(19) United States
(12) Patent Application Publication
(10) Pub. No.: US 2022/0112252 A1
(43) Pub. Date: Apr. 14, 2022

(54) MULTIMERIC T-CELL MODULATORY POLYPEPTIDES AND METHODS OF USE THEREOF

(71) Applicant: Cue Biopharma, Inc., Cambridge, MA (US)

(72) Inventors: Ronald D. Seidel, III, Cambridge, MA (US); Rodolfo J. Chaparro, Cambridge, MA (US)

(21) Appl. No.: 17/326,837

(22) Filed: May 21, 2021

Related U.S. Application Data
(63) Continuation of application No. PCT/US2019/067575, filed on Dec. 19, 2019.
(60) Provisional application No. 62/814,684, filed on Mar. 6, 2019.
(60) Provisional application No. 62/782,167, filed on Dec. 19, 2018.

(51) Int. Cl. C07K 14/47; C07K 14/74; C07K 14/55

(52) U.S. Cl. CPC C07K 14/4748; C07K 2319/30; C07K 14/55; C07K 14/70539

(57) ABSTRACT

The present disclosure provides T-cell modulatory multimeric polypeptides that comprise an immunomodulatory polypeptide and that comprise an epitope-presenting Wilms tumor peptide. A T-cell modulatory multimeric polypeptide is useful for modulating the activity of a T cell, and for modulating an immune response in an individual.

### CROSS-REFERENCE

[0001] This application claims the benefit of U.S. Provisional Patent Application No. 62/782,167, filed Dec. 19, 2018, and U.S. Provisional Patent Application No. 62/814,684, filed Mar. 6, 2019, which applications are incorporated herein by reference in their entirety.

### INTRODUCTION

[0002] An adaptive immune response involves the engagement of the T cell receptor (TCR), present on the surface of a T cell, with a small peptide antigen non-covalently presented on the surface of an antigen presenting cell (APC) by a major histocompatibility complex (MHC; also referred to in humans as a human leukocyte antigen (HLA) complex). This engagement represents the immune system's targeting mechanism and is a requisite molecular interaction for T cell modulation (activation or inhibition) and effector function. Following epitope-specific cell targeting, the targeted T cells are activated through engagement of costimulatory proteins found on the APC with counterpart costimulatory proteins the T cells. Both signals—epitope/TCR binding and engagement of APC costimulatory proteins with T cell costimulatory proteins—are required to drive T cell specificity and activation or inhibition. The TCR is specific for a given epitope; however, the costimulatory protein not epitope specific and instead is generally expressed on all T cells or on large T cell subsets.

### SUMMARY

[0003] The present disclosure provides T-cell modulatory multimeric polypeptides (TMMPs) that comprise an immunomodulatory polypeptide and that comprise an epitope-presenting Wilms tumor peptide. A T-cell modulatory multimeric polypeptide is useful for modulating the activity of a T cell, and for modulating an immune response in an individual.

### BRIEF DESCRIPTION OF THE DRAWINGS

[0004] FIG. 1A-1F are schematic depictions of various TMMPs of the present disclosure.

[0005] FIG. 2A-2F are schematic depictions of various disulfide-linked TMMPs of the present disclosure.

[0006] FIG. 3A-3E provides an amino acid sequence of WT-1 polypeptides. The sequences of FIGS. 3A-3E are set forth in SEQ ID NOs: 399-403, respectively.

[0007] FIG. 4A-4E provide amino acid sequences of exemplary polypeptide chains of TMMPs of the present disclosure. The sequences of the exemplary polypeptide chains of FIGS. 4A-4E are set forth in SEQ ID NOs: 405-409, respectively. The epitope sequences are set forth as follows: FIG. 4D: CMTWNQMNL (SEQ ID NO:266); FIG. 4E: CYTWNQMNL (SEQ ID NO:267).

[0008] FIG. 5A-5G provide amino acid sequences of immunoglobulin Fc polypeptides. The sequences of FIGS. 5A-5G are set forth in SEQ ID NOs: 410-421, respectively.

[0009] FIG. 6 provides a multiple amino acid sequence alignment of beta-2 microglobulin (β2M) precursors (i.e., including the leader sequence) from Homo sapiens (NP_004039.1; SEQ ID NO: 19), Pan troglodytes (NP_001009066.1; SEQ ID NO: 19), Maraca mulatta (NP_001040602.1; SEQ ID NO: 20), Bos taurus (NP_776318.1; SEQ ID NO: 21) and Mus musculus (NP_033865.2; SEQ ID NO: 22). Amino acids 1-20 are a signal peptide.

[0010] FIG. 7A-7C provide amino acid sequences of full-length human HLA heavy chains of alleles A*0101 (SEQ ID NO: 23), A*1101 (SEQ ID NO: 24), A*2402 (SEQ ID NO: 25), and A*3303 (SEQ ID NO: 26) (FIG. 7A); full-length human HLA heavy chain of allele 13*0702 (SEQ ID NO: 27) (FIG. 7B); and a full-length human HLA-C heavy chain (SEQ ID NO: 28) (FIG. 7C).

[0011] FIG. 8 provides an alignment of eleven mature MHC class I heavy chain amino acid sequences without their leader sequences, transmembrane domains, and intracellular domains. Top to bottom: SEQ ID NOs: 41-51.

[0012] FIGS. 9A-9B provide an alignment of HLA-A heavy chain amino acid sequences (FIG. 9A; SEQ ID NOs: 198-206, respectively) and a consensus sequence (FIG. 9B; SEQ ID NO: 29).

[0013] FIGS. 10A-10B provide an alignment of HLA-B heavy chain amino acid sequences (FIG. 10A; SEQ ID NOs: 207-213, respectively) and a consensus sequence (FIG. 10B; SEQ ID NO: 30).

[0014] FIGS. 11A-11B provide an alignment of HLA-C heavy chain amino acid sequences (FIG. 11A; SEQ ID NOs: 214-222, respectively) and a consensus sequence (FIG. 11B; SEQ ID NO: 31).

[0015] FIG. 12 provides a consensus amino acid sequence for each of HLA-E, —F, and -G heavy chains (SEQ ID NOs: 32-34, respectively). Variable amino acid (aa) positions are indicated as “X” residues sequentially numbered; the locations of amino acids 84, 139, and 236 are double underlined.

[0016] FIG. 13 provides an alignment of consensus amino acid sequences for HLA-A (SEQ ID NO: 35), -B (SEQ ID NO: 36), -C(SEQ ID NO: 37), -E (SEQ ID NO: 38), -F (SEQ ID NO: 39), and -G (SEQ ID NO: 40).

[0017] FIG. 14A-141 provide amino acid sequences of polypeptide chains of double disulfide-linked TMMP of the present disclosure. The sequences of the polypeptide chains of FIGS. 14A-141 are set forth in SEQ ID NOs: 422-430, respectively. The epitope sequences are set forth as follows: FIG. 14B: VLDFAPPGA (SEQ ID NO: 259); FIG. 14C: RMFPNAPYL (SEQ ID NO: 260); FIG. 14F: VLDFAPPGA (SEQ ID NO: 259); FIG. 14G: RMFPNAPYL (SEQ ID NO: 260); FIG. 14H: YMFPNAPYL (SEQ ID NO: 264); FIG. 14I: YMFPNAPYL (SEQ ID NO: 264),

[0018] FIG. 15 depicts expression and stability data for a WT1(37-45) epitope-containing TMMP of the present disclosure.

[0019] FIG. 16 depicts expression and stability data for a WT1(126-134) epitope-containing TMMP of the present disclosure.

[0020] FIG. 17A-17D provide schematic depictions of double disulfide-linked TMMP of the present disclosure.

[0021] FIG. 18A-18C provide schematic depictions of examples of configurations of disulfide-linked TMMPs of the present disclosure.

[0022] FIG. 19 provide schematic depictions of examples of positions of immunomodulatory polypeptides in TMMPs of the present disclosure.

[0023] FIG. 20A-20R provide amino acid sequences of exemplary polypeptide chains of TMMPs of the present disclosure. The sequences of the exemplary polypeptide chains of FIGS. 20A-20R are set forth in SEQ ID NOs: 431-448, respectively. The epitope sequences are set forth as follows: FIG. 20H: CYTWNQMNL (SEQ ID NO: 262); FIG. 20I: CYTWNQMNL (SEQ ID NO: 262); FIG. 20J: CYTWNQMNL (SEQ ID NO: 262); FIG. 20K: CYTWNQMNL (SEQ ID NO: 262); FIG. 20L: CYTWNQMNL (SEQ ID NO: 262); FIG. 20M: NYMNLGATL (SEQ ID NO: 263); FIG. 20N: NYMNLGATL (SEQ ID NO: 263); FIG. 20O: NYMNLGATL (SEQ ID NO: 263); FIG. 20P: NYMNLGATL (SEQ ID NO: 263); FIG. 20Q: NYMNLGATL (SEQ ID NO: 263); FIG. 20R: NYMNLGATL (SEQ ID NO: 263).

[0024] FIG. 21 depicts the effect of TMMPs, containing WT1 peptide epitopes and HLA-A*02 heavy chains, on antigen-specific CD8+ T cell expansion.

[0025] FIG. 22 depicts the effect of TMMPs containing WT1 peptide epitopes on expansion of WT1-specific CD8+ T cells from total PBMCs over a course of an 8-day re-stimulation culture following a 10-day priming culture.

[0026] FIG. 23 depicts production of TNF-§ and IFN-γ by WT1-specific CD8+ T cells expanded with WT1 37-45 containing TMMPs having either the G2C or R12C/G2C framework.

[0027] FIG. 24 depicts production of TNF-§ and IFN-γ by WT1-specific CD8+ T cells expanded with WT1 126-134 containing TMMPs having the R12C/G2C framework.

[0028] FIG. 25 depicts the effect of disulfide bonds on IL-2-driven immune cell activation.

[0029] FIG. 26 depicts the effect of TMMP containing variant IL-2 as the immunomodulatory polypeptide on CGLL-2 proliferation, compared to proleukine.

[0030] FIG. 27 depicts binding of the “1715+2380” TMPP to various Fc receptors.

### DEFINITIONS

[0031] The terms “polynucleotide” and “nucleic acid,” used interchangeably herein, refer to a polymeric form of nucleotides of any length, either ribonucleotides or deoxyribonucleotides. Thus, this term includes, but is not limited to, single-, double-, or multi-stranded DNA or RNA, genomic DNA, cDNA, DNA-RNA hybrids, or a polymer comprising purine and pyrimidine bases or other natural, chemically or biochemically modified, non-natural, or derivatized nucleotide bases.

[0032] The terms “peptide,” “polypeptide,” and “protein” are used interchangeably herein, and refer to a polymeric form of amino acids of any length, which can include coded and non-coded amino acids, chemically or biochemically modified or derivatized amino acids, and polypeptides having modified peptide backbones.

[0033] A polynucleotide or polypeptide has a certain percent “sequence identity” to another polynucleotide or polypeptide, meaning that, when aligned, that percentage of bases or amino acids are the same, and in the same relative position, when comparing the two sequences. Sequence identity can be determined in a number of different ways. To determine sequence identity, sequences can be aligned using various convenient methods and computer programs (e.g., BLAST, T-COFFEE, MUSCLE, MAFFT, etc.), available over the world wide web at sites including ncbi.nlm.nili.gov/BLAST, ebi.ac.uk/Tools/msa/tcoffee/, ebi.ac.uk/Tools/msa/muscle/, mafft.cbrc.jp/alignment/software/. See, e.g., Altschul et al. (1990), J. Mol. Biol. 215:403-10.

[0034] The term “conservative amino acid substitution” refers to the interchangeability in proteins of amino acid residues having similar side chains. For example, a group of amino acids having aliphatic side chains consists of glycine, alanine, valine, leucine, and isoleucine; a group of amino acids having aliphatic-hydroxyl side chains consists of serine and threonine; a group of amino acids having amide containing side chains consisting of asparagine and glutamine; a group of amino acids having aromatic side chains consists of phenylalanine, tyrosine, and tryptophan; a group of amino acids having basic side chains consists of lysine, arginine, and histidine; a group of amino acids having acidic side chains consists of glutamate and aspartate; and a group of amino acids having sulfur containing side chains consists of cysteine and methionine. Exemplary conservative amino acid substitution groups are: valine-leucine-isoleucine, phenylalanine-tyrosine, lysine-arginine, alanine-valine-glycine, and asparagine-glutamine.

[0035] The term “immunological synapse” or “immune synapse” as used herein generally refers to the natural interface between two interacting immune cells of an adaptive immune response including, e.g., the interface between an antigen-presenting cell (APC) or target cell and an effector cell, e.g., a lymphocyte, an effector T cell, a natural killer cell, and the like. An immunological synapse between an APC and a T cell is generally initiated by the interaction of a T cell antigen receptor and major histocompatibility complex molecules, e.g., as described in Bromley et al., Annu Rev Immunol. 2001; 19:375-96; the disclosure of which is incorporated herein by reference in its entirety.

[0036] “T cell” includes all types of immune cells expressing CD3, including T-helper cells (CD4⁺ cells), cytotoxic T-cells (CD8⁺ cells), T-regulatory cells (Treg), and NK-T cells.

[0037] The term “immunomodulatory polypeptide” (also referred to as a “co-stimulatory polypeptide”), as used herein, includes a polypeptide on an antigen presenting cell (APC) (e.g., a dendritic cell, a B cell, and the like) that specifically binds a cognate co-immunomodulatory polypeptide on a T cell, thereby providing a signal which, in addition to the primary signal provided by, for instance, binding of a TCR/CD3 complex with a major histocompatibility complex (MHC) polypeptide loaded with peptide, mediates a T cell response, including, but not limited to, proliferation, activation, differentiation, and the like. An immunomodulatory polypeptide can include, but is not limited to, CD7, B7-1 (CD80), B7-2 (CD86), PD-L1, PD-L2, 4-1BBL, OX40L. Fas ligand (FasL), inducible costimulatory ligand (ICOS-L), intercellular adhesion molecule (ICAM), CD30L, CD40, CD70, CD83, HLA-G, MICA, MICB, HVEM, lymphotoxin beta receptor, 3/TR6, ILT3, ILT4, HVEM, an agonist or antibody that binds Toll ligand receptor and a ligand that specifically binds with B7-H3.

[0038] As noted above, an “immunomodulatory polypeptide” (also referred to herein as a “MOD”) specifically binds a cognate co-immunomodulatory polypeptide on a T cell.

[0039] An “immunomodulatory domain” (“MOD”) of a TMMP of the present disclosure hinds a cognate co-immunomodulatory polypeptide, which may be present on a target T cell.

[0040] “Heterologous,” as used herein, means a nucleotide or polypeptide that is not found in the native nucleic acid or protein, respectively.

[0041] “Recombinant,” as used herein, means that a particular nucleic acid (DNA or RNA) is the product of various combinations of cloning, restriction, polymerase chain reaction (PCR) and/or ligation steps resulting in a construct having a structural coding or non-coding sequence distinguishable from endogenous nucleic acids found in natural systems. DNA sequences encoding polypeptides can be assembled from cDNA fragments or from a series of synthetic oligonucleotides, to provide a synthetic nucleic acid which is capable of being expressed from a recombinant transcriptional unit contained in a cell or in a cell-free transcription and translation system.

[0042] The terms “recombinant expression vector,” or “DNA construct” are used interchangeably herein to refer to a DNA molecule comprising a vector and at least one insert. Recombinant expression vectors are usually generated for the purpose of expressing and/or propagating the insert(s), or for the construction of other recombinant nucleotide sequences. The insert(s) may or may not be operably linked to a promoter sequence and may or may not be operably linked to DNA regulatory sequences.

[0043] As used herein, the term “affinity” refers to the equilibrium constant for the reversible binding of two agents (e.g., an antibody and an antigen) and is expressed as a dissociation constant (K_{D}). Affinity can be at least 1-fold greater, at least 2-fold greater, at least 3-fold greater, at least 4-fold greater, at least 5-fold greater, at least 6-fold greater, at least 7-fold greater, at least 8-fold greater, at least 9-fold greater, at least 10-fold greater, at least 20-fold greater, at least 30-fold greater, at least 40-fold greater, at least 50-fold greater, at least 60-fold greater, at least 70-fold greater, at least 80-fold greater, at least 90-fold greater, at least 100-fold greater, or at least 1,000-fold greater, or more, than the affinity of an antibody for unrelated amino acid sequences. Affinity of an antibody to a target protein can be, for example, from about 100 nanomolar (nM) to about 0.1 nM, from about 100 nM to about 1 picomolar (pM), or from about 100 nM to about 1 femtomolar (fM) or more. As used herein, the term “avidity” refers to the resistance of a complex of two or more agents to dissociation after dilution. The terms “immunoreactive” and “preferentially binds” are used interchangeably herein with respect to antibodies and/or antigen-binding fragments.

[0044] The term “binding,” as used herein (e.g. with reference to binding of a TMMP to a polypeptide (e.g., a T-cell receptor) on a T cell), refers to a non-covalent interaction between two molecules. Non-covalent binding refers to a direct association between two molecules, due to, for example, electrostatic, hydrophobic, ionic, and/or hydrogen-bond interactions, including interactions such as salt bridges and water bridges. Non-covalent binding interactions are generally characterized by a dissociation constant (K_{D}) of less than 10⁻⁶ M, less than 10⁻⁷ M, less than 10⁻⁸ M, less than 10⁻⁹ M, less than 10⁻¹⁰ M, less than 10⁻¹¹ M, less than 10⁻¹² M, less than 10⁻¹³ M, less than 10⁻¹⁴ M, or less than 10⁻¹⁵ M. “Affinity” refers to the strength of non-covalent binding, increased binding affinity being correlated with a lower K_{D}. “Specific binding” generally refers to binding with an affinity of at least about 10⁻⁷ M or greater, e.g., 5×10⁻⁷ M, 10⁻⁸ M, 5×10⁻⁸ M, 10⁻⁹ M, and greater. “Non-specific binding” generally refers to binding (e.g., the binding of a ligand to a moiety other than its designated binding site or receptor) with an affinity of less than about 10⁻⁷ M (e.g., binding with an affinity of 10⁻⁶ M, 10⁻⁵ M, 10⁻⁴ M). However, in some contexts, e.g., binding between a TCR and a peptide/MHC complex, “specific binding” can be in the range of from 1 μM to 100 μM, or from 100 μM to 1 mM. “Covalent binding” or “covalent bond,” as used herein, refers to the formation of one or more covalent chemical binds between two different molecules.

[0045] The terms “treatment”, “treating” and the like are used herein to generally mean obtaining a desired pharmacologic and/or physiologic effect. The effect may be prophylactic in terms of completely or partially preventing a disease or symptom thereof and/or may be therapeutic in terms of a partial or complete cure for a disease and/or adverse effect attributable to the disease. “Treatment” as used herein covers any treatment of a disease or symptom in a mammal, and includes: (a) preventing the disease or symptom from occurring in a subject which may be predisposed to acquiring the disease or symptom but has not yet been diagnosed as having it; (b) inhibiting the disease or symptom, i.e., arresting its development; and/or (c) relieving the disease, i.e., causing regression of the disease. The therapeutic agent may be administered before, during or after the onset of disease or injury. The treatment of ongoing disease, where the treatment stabilizes or reduces the undesirable clinical symptoms of the patient, is of particular interest. Such treatment is desirably performed prior to complete loss of function in the affected tissues. The subject therapy will desirably be administered during the symptomatic stage of the disease, and in some cases after the symptomatic stage of the disease.

[0046] The terms “individual,” “subject,” “host,” and “patient,” are used interchangeably herein and refer to any mammalian subject for whom diagnosis, treatment, or therapy is desired. Mammals include, e.g., humans, non-human primates, rodents (e.g., rats; mice), lagomorphs (e.g., rabbits), ungulates (e.g., cows, sheep, pigs, horses, goats, and the like), etc.

[0047] Before the present invention is further described, it is to be understood that this invention is not limited to particular embodiments described, as such may, of course, vary. It is also to be understood that the terminology used herein is for the purpose of describing particular embodiments only, and is not intended to be limiting, since the scope of the present invention will be limited only by the appended claims.

[0048] Where a range of values is provided, it is understood that each intervening value, to the tenth of the unit of the lower limit unless the context clearly dictates otherwise, between the upper and lower limit of that range and any other stated or intervening value in that stated range, is encompassed within the invention. The upper and lower limits of these smaller ranges may independently be included in the smaller ranges, and are also encompassed within the invention, subject to any specifically excluded limit in the stated range. Where the stated range includes one or both of the limits, ranges excluding either or both of those included limits are also included in the invention.

[0049] Unless defined otherwise, all technical and scientific terms used herein have the same meaning as commonly understood by one of ordinary skill in the art to which this invention belongs. Although any methods and materials similar or equivalent to those described herein can also be used in the practice or testing of the present invention, the preferred methods and materials are now described. All publications mentioned herein are incorporated herein by reference to disclose and describe the methods and/or materials in connection with which the publications are cited.

[0050] It must be noted that as used herein and in the appended claims, the singular forms “a,” “an,” and “the” include plural referents unless the context clearly dictates otherwise. Thus, for example, reference to a “T-cell modulatory multimeric polypeptide” includes a plurality of such polypeptides and reference to “the immunomodulatory polypeptide” includes reference to one or more immunomodulatory polypeptides and equivalents thereof known to those skilled in the art, and so forth. It is further noted that the claims may be drafted to exclude any optional element. As such, this statement is intended to serve as antecedent basis for use of such exclusive terminology as “solely,” “only” and the like in connection with the recitation of claim elements, or use of a “negative” limitation.

[0051] It is appreciated that certain features of the invention, which are, for clarity, described in the context of separate embodiments, may also be provided in combination in a single embodiment. Conversely, various features of the invention, which are, for brevity, described in the context of a single embodiment, may also be provided separately or in any suitable sub-combination. All combinations of the embodiments pertaining to the invention are specifically embraced by the present invention and are disclosed herein just as if each and every combination was individually and explicitly disclosed. In addition, all sub-combinations of the various embodiments and elements thereof are also specifically embraced by the present invention and are disclosed herein just as if each and every such sub-combination was individually and explicitly disclosed herein.

[0052] The publications discussed herein are provided solely for their disclosure prior to the filing date of the present application. Nothing herein is to be construed as an admission that the present invention is not entitled to antedate such publication by virtue of prior invention. Further, the dates of publication provided may be different from the actual publication dates which may need to be independently confirmed.

### DETAILED DESCRIPTION

[0053] The present disclosure provides T-cell modulatory multimeric polypeptides that comprise an immunomodulatory polypeptide and that comprise an epitope-presenting Wilms tumor-1 (WT-1) peptide. A TMMP is useful for modulating the activity of a T cell, and for modulating an immune response in an individual.

### T-Cell Modulatory Multimeric Polypeptides

[0054] The present disclosure provides a T-cell modulatory multimeric polypeptide (TMMP) comprising: a) a first polypeptide; and b) a second polypeptide, wherein the TMMP comprises an epitope; a first major histocompatibility complex (MHC) polypeptide; a second MHC polypeptide; one or more immunomodulatory polypeptides; and optionally an immunoglobulin (Ig) Fc polypeptide or a non-Ig scaffold. The present disclosure provides a TMMP, wherein the TMMP is a heterodimer comprising: a) a first polypeptide comprising a first MHC polypeptide; and b) a second polypeptide comprising a second MHC polypeptide, wherein the first polypeptide or the second polypeptide comprises an epitope (e.g., a peptide that presents an epitope); wherein the first polypeptide and/or the second polypeptide comprises one or more immunomodulatory polypeptides that can be the same or different; and optionally an Ig F c polypeptide or a non-Ig scaffold. A TMMP of the present disclosure is also referred to herein as a “multimeric polypeptide of the present disclosure” or a “synTac.” In some cases, the peptide epitope present in a TMMP of the present disclosure is a WT-1 peptide.

[0055] The present disclosure provides a TMMP comprising a heterodimeric polypeptide comprising: a) a first polypeptide comprising: i) a peptide epitope; and ii) a first MHC polypeptide; b) a second polypeptide comprising a second MHC polypeptide; and c) at least one immunomodulatory polypeptide, where the first and/or the second polypeptide comprises the at least one (i.e., one or more) immunomodulatory polypeptide. Optionally, the first or the second polypeptide comprises an Ig Fe polypeptide or a non-Ig scaffold. At least one of the one or more immunomodulatory polypeptides is a variant immunomodulatory polypeptide that exhibits reduced affinity to a cognate co-immunomodulatory polypeptide compared to the affinity of a corresponding wild-type immunomodulatory polypeptide for the cognate co-immunomodulatory polypeptide. The epitope present in a TMMP of the present disclosure hinds to a T-cell receptor (TCR) on a T cell with an affinity of at least 100 μM (e.g., at least 10 μM, at least 1 μM, at least 100 nM, at least 10 nM, or at least 1 nM). A TMMP of the present disclosure binds to a first T cell with an affinity that is at least 25% higher than the affinity with which the TMMP binds a second T cell, where the first T cell expresses on its surface the cognate co-immunomodulatory polypeptide and a TCR that binds the epitope with an affinity of at least 100 μM, and where the second T cell expresses on its surface the cognate co-immunomodulatory polypeptide but does not express on its surface a TCR that binds the epitope with an affinity of at least 100 μM (e.g., at least 10 μM, at least 1 μM, at least 100 nM, at least 10 nM, or at least 1 nM). In some cases, the peptide epitope present in a TMMP of the present disclosure is a WT-1 peptide.

[0056] The present disclosure provides a TMMP, wherein the TMMP is:

[0057] A) a heterodimer comprising: a) a first polypeptide comprising a first MHC polypeptide; and b) a second polypeptide comprising a second MIC polypeptide, wherein the first polypeptide or the second polypeptide comprises an epitope (e.g., a peptide that presents an epitope to a T cell); wherein the first polypeptide and/or the second polypeptide comprises one or more immunomodulatory polypeptides that can be the same or different, and wherein at least one of the one or more immunomodulatory polypeptides may be a wild-type immunomodulatory polypeptide or a variant of a wild-type immunomodulatory polypeptide, wherein the variant immunomodulatory polypeptide comprises 1, 2, 3, 4, 5, 6, 7, 8, 9, 10, 11, 12, 13, 14, 15, 16, 17, 18, 19, or 20 amino acid substitutions compared to the amino acid sequence of the corresponding wild-type immunomodulatory polypeptide; and wherein the first polypeptide or the second polypeptide optionally comprises an Ig Fc polypeptide or a non-Ig scaffold; or

[0058] B) a heterodimer comprising: a) a first polypeptide comprising a first MHC polypeptide; and b) a second polypeptide comprising a second MHC polypeptide, wherein the first polypeptide or the second polypeptide comprises an epitope; wherein the first polypeptide and/or the second polypeptide comprises one or more immunomodulatory polypeptides that can be the same or different,

[0059] wherein at least one of the one or more immunomodulatory polypeptides is a variant of a wild-type immunomodulatory polypeptide, wherein the variant immunomodulatory polypeptide comprises 1, 2, 3, 4, 5, 6, 7, 8, 9, 10, 11, 12, 13, 14, 15, 16, 17, 18, 19, or 20 amino acid substitutions compared to the amino acid sequence of the corresponding wild-type immunomodulatory polypeptide,

[0060] wherein at least one of the one or more immunomodulatory domains is a variant immunomodulatory polypeptide that exhibits reduced affinity to a cognate co-immunomodulatory polypeptide compared to the affinity of a corresponding wild-type immunomodulatory polypeptide for the cognate co-immunomodulatory polypeptide, and wherein the epitope binds to a TCR on a T cell with an affinity of at least 10⁻⁷ M, such that: i) the TMMP polypeptide hinds to a first T cell with an affinity that is at least 25% higher than the affinity with which the TMMP binds a second T cell, wherein the first T cell expresses on its surface the cognate co-immunomodulatory polypeptide and a TCR that binds the epitope with an affinity of at least 10⁻⁷ M, and wherein the second T cell expresses on its surface the cognate co-immunomodulatory polypeptide but does not express on its surface a TCR that binds the epitope with an affinity of at least 10⁻⁷ M; and/or ii) the ratio of the binding affinity of a control TMMP, wherein the control comprises a wild-type immunomodulatory polypeptide, to a cognate co-immunomodulatory polypeptide to the binding affinity of the TMMP comprising a variant of the wild-type immunomodulatory polypeptide to the cognate co-immunomodulatory polypeptide, when measured by bio-layer interferometry, is in a range of from 1.5:1 to 10⁶:1; and wherein the variant immunomodulatory polypeptide comprises 1, 2, 3, 4, 5, 6, 7, 8, 9, 10, 11, 12, 13, 14, 15, 16, 17, 18, 19, or 20 amino acid substitutions compared to the amino acid sequence of the corresponding wild-type immunomodulatory polypeptide; and

[0061] wherein the first polypeptide or the second polypeptide optionally comprises an Ig Fc polypeptide or a non-Ig scaffold; or

[0062] C) a heterodimer comprising: a) a first polypeptide comprising, in order from N-terminus to C-terminus: i) an epitope; ii) a first MHC polypeptide; and b) a second polypeptide comprising, in order from N-terminus to C-terminus: i) a second MHC polypeptide; and ii) optionally an immunoglobulin (Ig) Fe polypeptide or a non-Ig scaffold, wherein the TMMP comprises one or more immunomodulatory domains that can be the same or different, wherein at least one of the one or more immunomodulatory domain is: A) at the C-terminus of the first polypeptide; B) at the N-terminus of the second polypeptide; C) at the C-terminus of the second polypeptide; or D) at the C-terminus of the first polypeptide and at the N-terminus of the second polypeptide, and wherein at least one of the one or more immunomodulatory domains may be a wild-type immunomodulatory polypeptide or a variant of a wild-type immunomodulatory polypeptide, wherein the variant immunomodulatory polypeptide comprises 1, 2, 3, 4, 5, 6, 7, 8, 9, 10, 11, 12, 13, 14, 15, 16, 17, 18, 19, or 20 amino acid substitutions compared to the amino acid sequence of the corresponding wild-type immunomodulatory polypeptide; and

[0063] optionally wherein at least one of the one or more immunomodulatory domains is a variant immunomodulatory polypeptide that exhibits reduced affinity to a cognate co-immunomodulatory polypeptide compared to the affinity of a corresponding wild-type immunomodulatory polypeptide for the cognate co-immunomodulatory polypeptide, and wherein the epitope binds to a TCR on a T cell with an affinity of at least 10⁻⁷ M, such that: i) the TMMP binds to a first T cell with an affinity that is at least 25% higher than the affinity with which the TMMP binds a second T cell, wherein the first T cell expresses on its surface the cognate co-immunomodulatory polypeptide and a TCR that binds the epitope with an affinity of at least 10⁻⁷ M, and wherein the second T cell expresses on its surface the cognate co-immunomodulatory polypeptide but does not express on its surface a TCR that binds the epitope with an affinity of at least 10⁻⁷ M; and/or ii) the ratio of the binding affinity of a control TMMP, wherein the control comprises a wild-type immunomodulatory polypeptide, to a cognate co-immunomodulatory polypeptide to the binding affinity of the TMMP comprising a variant of the wild-type immunomodulatory polypeptide to the cognate co-immunomodulatory polypeptide, when measured by bio-layer interferometry, is in a range of from 1.5:1 to 10⁶:1; and wherein the variant immunomodulatory polypeptide comprises 1, 2, 3, 4, 5, 6, 7, 8, 9, 10, 11, 12, 13, 14, 15, 16, 17, 18, 19, or 20 amino acid substitutions compared to the amino acid sequence of the corresponding wild-type immunomodulatory polypeptide. In some cases, the peptide epitope present in a TMMP of the present disclosure is a WT-1 peptide.

[0064] The present disclosure provides a TMMP comprising: a) a first polypeptide comprising, in order from N-terminus to C-terminus: i) an epitope; ii) a first MHC polypeptide; and b) a second polypeptide comprising, in order from N-terminus to C-terminus: i) a second MHC polypeptide; and ii) optionally an Ig Fc polypeptide or a non-Ig scaffold. A TMMP of the present disclosure comprises one or more immunomodulatory polypeptides, wherein at least one of the one or more immunomodulatory polypeptides is: A) at the C-terminus of the first polypeptide; B) at the N-terminus of the second polypeptide; C) at the C-terminus of the second polypeptide; or D) at the C-terminus of the first polypeptide and at the N-terminus of the second polypeptide. At least one of the one or more immunomodulatory polypeptides is a variant immunomodulatory polypeptide that exhibits reduced affinity to a cognate co-immunomodulatory polypeptide compared to the affinity of a corresponding wild-type immunomodulatory polypeptide for the cognate co-immunomodulatory polypeptide. The epitope present in a TMMP of the present disclosure binds to a T-cell receptor (TCR) on a T cell with an affinity of at least 100 μM (e.g., at least 10 μM, at least 1 μM, at least 100 nM, at least 10 nM, or at least 1 nM). A TMMP of the present disclosure binds to a first T cell with an affinity that is at least 25% higher than the affinity with which the TMMP binds a second T cell, where the first T cell expresses on its surface the cognate co-immunomodulatory polypeptide and a TCR that binds the epitope with an affinity of at least 100 μM, and where the second T cell expresses on its surface the cognate co-immunomodulatory polypeptide but does not express on its surface a TCR that binds the epitope with an affinity of at least 100 μM (e.g., at least 10 μM, at least 1 μM, at least 100 nM, at least 10 nM, or at least 1 nM).

[0065] In some cases, the epitope present in a TMMP of the present disclosure binds to a TCR on a T cell with an affinity of from about 10⁻⁴ M to about 5×10⁻⁴ M, from about 5×10⁻⁴ M to about 10⁻⁵ M, from about 10⁻⁵ M to 5×10⁻⁵ M, from about 5×10⁻⁵ M to 10⁻⁶ M, from about 10⁻⁶ M to about 5×10⁻⁶ M, from about 5×10⁻⁶ M to about 10⁻⁷ M, from about 10⁻⁷ M to about 5×10⁻⁷ M, from about 5×10⁻⁷ M to about 10⁻⁸ M, or from about 10⁻⁸ M to about 10⁻⁹ M. Expressed another way, in some cases, the epitope present in a TMMP of the present disclosure hinds to a TCR on a T cell with an affinity of from about 1 nM to about 5 nM, from about 5 nM to about 10 nM, from about 10 nM to about 50 nM, from about 50 nM to about 100 nM, from about 0.1 μM to about 0.5 μM, from about 0.5 μM to about 1 μM, from about 1 μM to about 5 μM, from about 5 μM to about 10 μM, from about 10 μM to about 25 μM, from about 25 μM to about 50 μM, from about 50 μM to about 75 μM, from about 75 μM to about 100 μM.

[0066] An immunomodulatory polypeptide present in a TMMP of the present disclosure binds to its cognate co-immunomodulatory polypeptide with an affinity that it at least 10% less, at least 15% less, at least 20% less, at least 25% less, at least 30% less, at least 35% less, at least 40% less, at least 45% less, at least 50% less, at least 55% less, at least 60% less, at least 65% less, at least 70% less, at least 75% less, at least 80% less, at least 85% less, at least 90% less, at least 95% less, or more than 95% less, than the affinity of a corresponding wild-type immunomodulatory polypeptide for the cognate co-immunomodulatory polypeptide.

[0067] In some cases, a variant immunomodulatory polypeptide present in a TMMP of the present disclosure has a binding affinity for a cognate co-immunomodulatory polypeptide that is from 1 nM to 100 nM, or from 100 nM to 100 μM. For example, in some cases, a variant immunomodulatory polypeptide present in a TMMP of the present disclosure has a binding affinity for a cognate co-immunomodulatory polypeptide that is from about 100 nM to 150 nM, from about 150 nM to about 200 nM, from about 200 nM to about 250 nM, from about 250 nM to about 300 nM, from about 300 nM to about 350 nM, from about 350 nM to about 400 nM, from about 400 nM to about 500 nM, from about 500 nM to about 600 nM, from about 600 nM to about 700 nM, from about 700 nM to about 800 nM, from about 800 nM to about 900 nM, from about 900 nM to about 1 μM, to about 1 μM to about 5 μM, from about 5 μM to about 10 μM, from about 10 μM to about 15 μM, from about 15 μM to about 20 μM, from about 20 μM to about 25 μM, from about 25 μM to about 50 μM, from about 50 μM to about 75 μM, or from about 75 μM to about 100 μM. In some cases, a variant immunomodulatory polypeptide present in a TMMP of the present disclosure has a binding affinity for a cognate co-immunomodulatory polypeptide that is from about 1 nM to about 5 nM, from about 5 nM to about 10 nM, from about 10 nM to about 50 nM, from about 50 nM to about 100 nM.

[0068] The combination of the reduced affinity of the immunomodulatory polypeptide for its cognate co-immunomodulatory polypeptide, and the affinity of the epitope for a TCR, provides for enhanced selectivity of a TMMP of the present disclosure. For example, a TMMP of the present disclosure binds selectively to a first T cell that displays both: i) a TCR specific for the epitope present in the TMMP; and ii) a co-immunomodulatory polypeptide that binds to the immunomodulatory polypeptide present in the TMMP, compared to binding to a second T cell that displays: i) a TCR specific for an epitope other than the epitope present in the TMMP; and ii) a co-immunomodulatory polypeptide that binds to the immunomodulatory polypeptide present in the TMMP. For example, a TMMP of the present disclosure binds to the first T cell with an affinity that is at least 10%, at least 15%, at least 20%, at least 25%, at least 30%, at least 40%, at least 50%, at least 60%, at least 70%, at least 80%, at least 90%, at least 2-fold, at least 2.5-fold, at least 5-fold, at least 10-fold, at least 15-fold, at least 20-fold, at least 25-fold, at least 50-fold, at least 100-fold, or more than 100-fold, higher than the affinity to which it binds the second T cell.

[0069] In some cases, a TMMP of the present disclosure, when administered to an individual in need thereof, induces both an epitope-specific T cell response and an epitope non-specific T cell response. In other words, in some cases, a TMMP of the present disclosure, when administered to an individual in need thereof, induces an epitope-specific T cell response by modulating the activity of a first T cell that displays both: i) a TCR specific for the epitope present in the TMMP; ii) a co-immunomodulatory polypeptide that binds to the immunomodulatory polypeptide present in the TMMP; and induces an epitope non-specific T cell response by modulating the activity of a second T cell that displays: i) a TCR specific for an epitope other than the epitope present in the TMMP; and ii) a co-immunomodulatory polypeptide that binds to the immunomodulatory polypeptide present in the TMMP. The ratio of the epitope-specific T cell response to the epitope-non-specific T cell response is at least 2:1, at least 5:1, at least 10:1, at least 15:1, at least 20:1, at least 25:1, at least 50:1, or at least 100:1. The ratio of the epitope-specific T cell response to the epitope-non-specific T cell response is from about 2:1 to about 5:1, from about 5:1 to about 10:1, from about 10:1 to about 15:1, from about 15:1 to about 20:1, from about 20:1 to about 25:1, from about 25:1 to about 50:1, or from about 50:1 to about 100:1, or more than 100:1. “Modulating the activity” of a T cell can include one or more of: i) activating a cytotoxic (e.g., CD8′) T cell; ii) inducing cytotoxic activity of a cytotoxic (e.g., CD8⁺) T cell; iii) inducing production and release of a cytotoxin (e.g., a perforin; a granzyme; a granulysin) by a cytotoxic (e.g., CD8⁺) T cell; iv) inhibiting activity of an autoreactive T cell; and the like.

[0070] The combination of the reduced affinity of the immunomodulatory polypeptide for its cognate co-immunomodulatory polypeptide, and the affinity of the epitope for a TCR, provides for enhanced selectivity of a TMMP of the present disclosure. Thus, for example, a TMMP of the present disclosure binds with higher avidity to a first T cell that displays both: i) a TCR specific for the epitope present in the TMMP; and ii) a co-immunomodulatory polypeptide that binds to the immunomodulatory polypeptide present in the TMMP, compared to the avidity to which it binds to a second T cell that displays: i) a TCR specific for an epitope other than the epitope present in the TMMP; and ii) a co-immunomodulatory polypeptide that binds to the immunomodulatory polypeptide present in the TMMP.

[0071] Binding affinity between an immunomodulatory polypeptide and its cognate co-immunomodulatory polypeptide can be determined by bio-layer interferometry (BLI) using purified immunomodulatory polypeptide and purified cognate co-immunomodulatory polypeptide. Binding affinity between a TMMP and its cognate co-immunomodulatory polypeptide can be determined by BLI using purified TMMP and the cognate co-immunomodulatory polypeptide. BLI methods are well known to those skilled in the art. See, e.g., Lad et al. (2015) J. Biomol. Screen. 20(4):498-507; and Shah and Duncan (2014) J. Vis. Exp. 18:e51383.

[0072] A BLI assay can be carried out using an Octet RED 96 (Pal FortéBio) instrument, or a similar instrument, as follows. A TMMP (e.g., a TMMP of the present disclosure; a control TMMP (where a control TMMP comprises a wild-type immunomodulatory polypeptide)) is immobilized onto an insoluble support (a “biosensor”). The immobilized TMMP is the “target.” Immobilization can be effected by immobilizing a capture antibody onto the insoluble support, where the capture antibody immobilizes the TMMP. For example, immobilization can be effected by immobilizing anti-Fc (e.g., anti-human IgG Fe) antibodies onto the insoluble support, where the immobilized anti-Fc antibodies bind to and immobilize the TMMP (where the TMMP comprises an IgFc polypeptide). A co-immunomodulatory polypeptide is applied, at several different concentrations, to the immobilized TMMP, and the instrument's response recorded. Assays are conducted in a liquid medium comprising 25 mM HEPES pH 6.8, 5% poly(ethylene glycol) 6000, 50 mM KCl, 0.1% bovine serum albumin, and 0.02% Tween 20 nonionic detergent. Binding of the co-immunomodulatory polypeptide to the immobilized TMMP is conducted at 30° C. As a positive control for binding affinity, an anti-MHC Class I monoclonal antibody can be used. For example, anti-HLA Class I monoclonal antibody W6/32 (American Type Culture Collection No. HB-95; Parham et al. (1979) J. Immunol. 123:342), which has a K_{D} of 7 nM, can be used. A standard curve can be generated using serial dilutions of the anti-MHC Class I monoclonal antibody. The co-immunomodulatory polypeptide, or the anti-MHC Class I mAb, is the “analyte.” BLI analyzes the interference pattern of white light reflected from two surfaces: i) from the immobilized polypeptide (“target”); and ii) an internal reference layer. A change in the number of molecules (“analyte”; e.g., co-immunomodulatory polypeptide; anti-HLA antibody) bound to the biosensor tip causes a shift in the interference pattern; this shift in interference pattern can be measured in real time. The two kinetic terms that describe the affinity of the target/analyte interaction are the association constant (kₐ) and dissociation constant (k_{d}). The ratio of these two terms (k_{d}/ₐ) gives rise to the affinity constant K_{D}.

[0073] The BLI assay is carried out in a multi-well plate. To run the assay, the plate layout is defined, the assay steps are defined, and biosensors are assigned in Octet Data Acquisition software. The biosensor assembly is hydrated. The hydrated biosensor assembly and the assay plate are equilibrated for 10 minutes on the Octet instrument. Once the data are acquired, the acquired data are loaded into the Octet Data Analysis software. The data are processed in the Processing window by specifying method for reference subtraction, y-axis alignment, inter-step correction, and Savitzky-Golay filtering. Data are analyzed in the Analysis window by specifying steps to analyze (Association and Dissociation), selecting curve fit model (1:1), fitting method (global), and window of interest (in seconds). The quality of fit is evaluated. K_{D} values for each data trace (analyte concentration) can be averaged if within a 3-fold range. K_{T}) error values should be within one order of magnitude of the affinity constant values; R² values should be above 0.95. See, e.g., Abdiche et al. (2008) J. Anal. Biochem. 377:209.

[0074] Unless otherwise stated herein, the affinity of a TMMP of the present disclosure for a cognate co-immunomodulatory polypeptide, or the affinity of a control TMMP (where a control TMMP comprises a wild-type immunomodulatory polypeptide) for a cognate co-immunomodulatory polypeptide, is determined using BLI, as described above.

[0075] In some cases, the ratio of: i) the binding affinity of a control TMMP (where the control comprises a wild-type immunomodulatory polypeptide) to a cognate co-immunomodulatory polypeptide to ii) the binding affinity of a TMMP of the present disclosure comprising a variant of the wild-type immunomodulatory polypeptide to the cognate co-immunomodulatory polypeptide, when measured by BLI (as described above), is at least 1.5:1, at least 2:1, at least 5:1, at least 10:1, at least 15:1, at least 20:1, at least 25:1, at least 50:1, at least 100:1, at least 500:1, at least 10²:1, at least 5×10²:1, at least 10³:1, at least 5×10³:1, at least 10⁴:1, at least 10⁵:1, or at least 10⁶:1. In some cases, the ratio of: i) the binding affinity of a control TMMP (where the control comprises a wild-type immunomodulatory polypeptide) to a cognate co-immunomodulatory polypeptide to ii) the binding affinity of a TMMP of the present disclosure comprising a variant of the wild-type immunomodulatory polypeptide to the cognate co-immunomodulatory polypeptide, when measured by BLI, is in a range of from 1.5:1 to 10⁶:1, e.g., from 1.5:1 to 10:1, from 10:1 to 50:1, from 50:1 to 10²:1, from 10²:1 to 10³:1, from 10³:1 to 10⁴:1, from 10⁴:1 to 10⁵:1, or from 10⁵:1 to 10⁶:1.

[0076] As an example, where a control TMMP comprises a wild-type IL-2 polypeptide, and where a TMMP of the present disclosure comprises a variant IL-2 polypeptide (comprising from 1 to 10 amino acid substitutions relative to the amino acid sequence of the wild-type IL-2 polypeptide) as the immunomodulatory polypeptide, the ratio of: i) the binding affinity of the control TMMP to an IL-2 receptor (i.e., the cognate co-immunomodulatory polypeptide) to ii) the binding affinity of the TMMP of the present disclosure to the IL-2 receptor, when measured by BLI, is at least 1.5:1, at least 2:1, at least 5:1, at least 10:1, at least 15:1, at least 20:1, at least 25:1, at least 50:1, at least 100:1, at least 500:1, at least 10²:1, at least 5×10²:1, at least 10³:1, at least 5×10³:1, at least 10⁴:1, at least 10⁵:1, or at least 10⁶:1. In some cases, where a control TMMP comprises a wild-type IL-2 polypeptide, and where a TMMP of the present disclosure comprises a variant IL-2 polypeptide (comprising from 1 to 10 amino acid substitutions relative to the amino acid sequence of the wild-type IL-2 polypeptide) as the immunomodulatory polypeptide, the ratio of: i) the binding affinity of the control TMMP to an IL-2 receptor (i.e., the cognate co-immunomodulatory polypeptide) to ii) the binding affinity of the TMMP of the present disclosure to the IL-2 receptor, when measured by BLI, is in a range of from 1.5:1 to 10⁶:1, e.g., from 1.5:1 to 10:1, from 10:1 to 50:1, from 50:1 to 10²:1, from 10²:1 to 10³:1, from 10³:1 to 10⁴:1, from 10⁴:1 to 10⁵:1, or from 10⁵:1 to 10⁶:1.

[0077] As another example, where a control TMMP comprises a wild-type PD-L1 polypeptide, and where a TMMP of the present disclosure comprises a variant PD-L1 polypeptide (comprising from 1 to 10 amino acid substitutions relative to the amino acid sequence of the wild-type PD-L1 polypeptide) as the immunomodulatory polypeptide, the ratio of: i) the binding affinity of the control TMMP to a PD-1 polypeptide (i.e., the cognate co-immunomodulatory polypeptide) to ii) the binding affinity of the TMMP of the present disclosure to the PD-1 polypeptide, when measured by BLI, is at least 1.5:1, at least 2:1, at least 5:1, at least 10:1, at least 15:1, at least 20:1, at least 25:1, at least 50:1, at least 100:1, at least 500:1, at least 10²:1, at least 5×10²:1, at least 10³:1, at least 5×10³:1, at least 10⁴:1, at least 10⁵:1, or at least 10⁶:1.

[0078] As another example, where a control TMMP comprises a wild-type CD80 polypeptide, and where a TMMP of the present disclosure comprises a variant CD80 polypeptide (comprising from 1 to 10 amino acid substitutions relative to the amino acid sequence of the wild-type CD80 polypeptide) as the immunomodulatory polypeptide, the ratio of: i) the binding affinity of the control TMMP to a CTLA4 polypeptide (i.e., the cognate co-immunomodulatory polypeptide) to ii) the binding affinity of the TMMP of the present disclosure to the CTLA4 polypeptide, when measured by BLI, is at least 1.5:1, at least 2:1, at least 5:1, at least 10:1, at least 15:1, at least 20:1, at least 25:1, at least 50:1, at least 100:1, at least 500:1, at least 10²:1, at least 5×10²:1, at least 10³:1, at least 5×10³:1, at least 10⁴:1, at least 10⁵:1, or at least 10⁶:1.

[0079] As another example, where a control TMMP comprises a wild-type CD80 polypeptide, and where a TMMP of the present disclosure comprises a variant CD80 polypeptide (comprising from 1 to 10 amino acid substitutions relative to the amino acid sequence of the wild-type CD80 polypeptide) as the immunomodulatory polypeptide, the ratio of: i) the binding affinity of the control TMMP to a CD28 polypeptide (i.e., the cognate co-immunomodulatory polypeptide) to ii) the binding affinity of the TMMP of the present disclosure to the CD28 polypeptide, when measured by BLI, is at least 1.5:1, at least 2:1, at least 5:1, at least 10:1, at least 15:1, at least 20:1, at least 25:1, at least 50:1, at least 100:1, at least 500:1, at least 10²:1, at least 5×10²:1, at least 10³:1, at least 5×10³:1, at least 10⁴:1, at least 10⁵:1, or at least 10⁶:1.

[0080] As another example, where a control TMMP comprises a wild-type 4-1BBL polypeptide, and where a TMMP of the present disclosure comprises a variant 4-1BBL polypeptide (comprising from 1 to 10 amino acid substitutions relative to the amino acid sequence of the wild-type 4-1BBL polypeptide) as the immunomodulatory polypeptide, the ratio of: i) the binding affinity of the control TMMP to a 4-1BB polypeptide (i.e., the cognate co-immunomodulatory polypeptide) to ii) the binding affinity of the TMMP of the present disclosure to the 4-1BB polypeptide, when measured by BLI, is at least 1.5:1, at least 2:1, at least 5:1, at least 10:1, at least 15:1, at least 20:1, at least 25:1, at least 50:1, at least 100:1, at least 500:1, at least 10²:1, at least 5×10²:1, at least 10³:1, at least 5×10³:1, at least 10⁴:1, at least 10⁵:1, or at least 10⁶:1.

[0081] As another example, where a control TMMP comprises a wild-type CD86 polypeptide, and where a TMMP of the present disclosure comprises a variant CD86 polypeptide (comprising from 1 to 10 amino acid substitutions relative to the amino acid sequence of the wild-type CD86 polypeptide) as the immunomodulatory polypeptide, the ratio of: i) the binding affinity of the control TMMP to a CD28 polypeptide (i.e., the cognate co-immunomodulatory polypeptide) to ii) the binding affinity of the TMMP of the present disclosure to the CD28 polypeptide, when measured by BLI, is at least 1.5:1, at least 2:1, at least 5:1, at least 10:1, at least 15:1, at least 20:1, at least 25:1, at least 50:1, at least 100:1, at least 500:1, at least 10²:1, at least 5×10²:1, at least 10³:1, at least 5×10³:1, at least 10⁴:1, at least 10⁵:1, or at least 10⁶:1.

[0082] Binding affinity of a TMMP of the present disclosure to a target T cell can be measured in the following manner: A) contacting a TMMP of the present disclosure with a target T-cell expressing on its surface: i) a cognate co-immunomodulatory polypeptide that binds the parental wild-type immunomodulatory polypeptide; and ii) a T-cell receptor that binds to the epitope, where the TMMP comprises an epitope tag, such that the TMMP binds to the target T-cell; B) contacting the target T-cell-bound TMMP with a fluorescently labeled binding agent (e.g., a fluorescently labeled antibody) that binds to the epitope tag, generating a TMMP/target T-cell/binding agent complex; C) measuring the mean fluorescence intensity (MFI) of the TMMP/target T-cell/binding agent complex using flow cytometry. The epitope tag can be, e.g., a FLAG tag, a hemagglutinin tag, a c-myc tag, a poly(histidine) tag, etc. The MFI measured over a range of concentrations of the TMMP library member provides a measure of the affinity. The MFI measured over a range of concentrations of the TMMP library member provides a half maximal effective concentration (EC₅₀) of the TMMP. In some cases, the EC₅₀ of a TMMP of the present disclosure for a target T cell is in the nM range; and the EC₅₀ of the TMMP for a control T cell (where a control T cell expresses on its surface: i) a cognate co-immunomodulatory polypeptide that binds the parental wild-type immunomodulatory polypeptide; and ii) a T-cell receptor that does not bind to the epitope present in the TMMP) is in the μM range. In some cases, the ratio of the EC₅₀ of a TMMP of the present disclosure for a control T cell to the EC₅₀ of the TMMP for a target T cell is at least 1.5:1, at least 2:1, at least 5:1, at least 10:1, at least 15:1, at least 20:1, at least 25:1, at least 50:1, at least 100:1, at least 500:1, at least 10²:1, at least 5×10²:1, at least 10³:1, at least 5×10³:1, at least 10⁴:1, at lease 10⁵:1, or at least 10⁶:1. The ratio of the EC₅₀ of a TMMP of the present disclosure for a control T cell to the EC₅₀ of the TMMP for a target T cell is an expression of the selectivity of the TMMP.

[0083] In some cases, when measured as described in the preceding paragraph, a TMMP of the present disclosure exhibits selective binding to target T-cell, compared to binding of the TMMP library member to a control T cell that comprises: i) the cognate co-immunomodulatory polypeptide that hinds the parental wild-type immunomodulatory polypeptide; and ii) a T-cell receptor that binds to an epitope other than the epitope present in the TMMP library member.

### Dimerized TMMPs

[0084] A TMMP of the present disclosure can be dimerized; i.e., the present disclosure provides a multimeric polypeptide comprising a dimer of a TMMP of the present disclosure. Thus, the present disclosure provides a TMMP comprising: A) a first heterodimer comprising: a) a first polypeptide comprising: i) a peptide epitope; and ii) a first major histocompatibility complex (MHC) polypeptide; and b) a second polypeptide comprising: i) a second MHC polypeptide, wherein the first heterodimer comprises one or more immunomodulatory polypeptides; and B) a second heterodimer comprising: a) a first polypeptide comprising: i) a peptide epitope; and ii) a first MHC polypeptide; and h) a second polypeptide comprising: i) a second MHC polypeptide, wherein the second heterodimer comprises one or more immunomodulatory polypeptides, and wherein the first heterodimer and the second heterodimer are covalently linked to one another. In some cases, the two TMMPs are identical to one another in amino acid sequence. In some cases, the first heterodimer and the second heterodimer are covalently linked to one another via a C-terminal region of the second polypeptide of the first heterodimer and a C-terminal region of the second polypeptide of the second heterodimer. In some cases, first heterodimer and the second heterodimer are covalently linked to one another via the C-terminal amino acid of the second polypeptide of the first heterodimer and the C-terminal region of the second polypeptide of the second heterodimer; for example, in some cases, the C-terminal amino acid of the second polypeptide of the first heterodimer and the C-terminal region of the second polypeptide of the second heterodimer are linked to one another, either directly or via a linker. The linker can be a peptide linker. The peptide linker can have a length of from 1 amino acid to 200 amino acids (e.g., from 1 amino acid (aa) to 5 aa, from 5 aa to 10 aa, from 10 aa to 25 aa, from 25 aa to 50 aa, from 50 aa to 100 aa, from 100 aa to 150 aa, or from 150 aa to 200 aa). In some cases, the peptide epitope of the first heterodimer and the peptide epitope of the second heterodimer comprise the same amino acid sequence. In some cases, the first MHC polypeptide of the first and the second heterodimer is an MHC Class I β2-microglobulin, and wherein the second MHC polypeptide of the first and the second heterodimer is an MHC Class I heavy chain. In some cases, the immunomodulatory polypeptide of the first heterodimer and the immunomodulatory polypeptide of the second heterodimer comprise the same amino acid sequence. In some cases, the immunomodulatory polypeptide of the first heterodimer and the immunomodulatory polypeptide of the second heterodimer are variant immunomodulatory polypeptides that comprise from 1 to 10 amino acid substitutions compared to a corresponding parental wild-type immunomodulatory polypeptide, and wherein the from 1 to 10 amino acid substitutions result in reduced affinity binding of the variant immunomodulatory polypeptide to a cognate co-immunomodulatory polypeptide. In some cases, the immunomodulatory polypeptide of the first heterodimer and the immunomodulatory polypeptide of the second heterodimer are each independently selected from the group consisting of IL-2, 4-1BBL, PD-L1, CD80, CD86, ICOS-L, OX-40L, FasL, JAG1 (CD339), TGFβ, CD70, and ICAM. Examples, of suitable MHC polypeptides, immunomodulatory polypeptides, and peptide epitopes are described below.

### MHC Polypeptides

[0085] As noted above, a TMMP of the present disclosure includes MHC polypeptides. For the purposes of the instant disclosure, the term “major histocompatibility complex (MHC) polypeptides” is meant to include MHC polypeptides of various species, including human MHC (also referred to as human leukocyte antigen (HLA)) polypeptides, rodent (e.g., mouse, rat, etc.) MHC polypeptides, and MHC polypeptides of other mammalian species (e.g., lagomorphs, non-human primates, canines, felines, ungulates (e.g., equines, bovines, ovines, caprines, etc.), and the like. The term “MHC polypeptide” is meant to include Class I MHC polypeptides (e.g., β-2 microglobulin and MHC class I heavy chain).

[0086] In some cases, the first MHC polypeptide is an MHC Class β2M (β2M) polypeptide, and the second MHC polypeptide is an MHC Class I heavy chain (H chain) (“MHC-H”)). In other instances, the first MHC polypeptide is an MHC Class I heavy chain polypeptide; and the second MHC polypeptide is a β2M polypeptide. In some cases, both the β2M and MHC-H chain are of human origin; i.e., the MHC-H chain is an HLA heavy chain, or a variant thereof. Unless expressly stated otherwise, a TMMP of the present disclosure does not include membrane anchoring domains (transmembrane regions) of an MHC Class I heavy chain, or a part of MHC Class I heavy chain sufficient to anchor the resulting TMMP to a cell (e.g., eukaryotic cell such as a mammalian cell) in which it is expressed. In some cases, the MHC Class I heavy chain present in a TMMP of the present disclosure does not include a signal peptide, a transmembrane domain, or an intracellular domain (cytoplasmic tail) associated with a native MHC Class I heavy chain. Thus, e.g., in some cases, the MHC Class I heavy chain present in a TMMP of the present disclosure includes only the α1, α2, and α3 domains of an MHC Class I heavy chain. In some cases, the MHC Class I heavy chain present in a TMMP of the present disclosure has a length of from about 270 amino acids (aa) to about 290 aa. In some cases, the MHC Class I heavy chain present in a TMMP of the present disclosure has a length of 270 aa, 271 aa, 272 aa, 273 aa, 274 aa, 275 aa, 276 aa, 277 aa, 278 aa, 279 aa, 280 aa, 281 aa, 282 aa, 283 aa, 284 aa, 285 aa, 286 aa, 287 aa, 288 aa, 289 aa, or 290 aa.

[0087] In some cases, an MHC polypeptide of a TMMP is a human MHC polypeptide, where human MHC polypeptides are also referred to as “human leukocyte antigen” (“HLA”) polypeptides. In some cases, an MHC polypeptide of a TMMP is a Class I HLA polypeptide, e.g., a β2-microglobulin polypeptide, or a Class I HLA heavy chain polypeptide. Class I HLA heavy chain polypeptides include HLA-A heavy chain polypeptides, HLA-B heavy chain polypeptides, HLA-C heavy chain polypeptides, HLA-E heavy chain polypeptides, HLA-F heavy chain polypeptides, and HLA-G heavy chain polypeptides.

### MHC Class I Heavy Chains

[0088] In some cases, an MHC Class I heavy chain polypeptide present in a TMMP of the present disclosure comprises an amino acid sequence having at least 75%, at least 80%, at least 85%, at least 90%, at least 95%, at least 98%, at least 99%, or 100%, amino acid sequence identity to all or part (e.g., 50, 75, 100, 150, 200, or 250 contiguous amino acids) of the amino acid sequence of any of the human HLA heavy chain polypeptides depicted in FIGS. 7-13. In some cases, the MHC Class I heavy chain has a length of 270 aa, 271 aa, 272 aa, 273 aa, 274 aa, 275 aa, 276 aa, 277 aa, 278 aa, 279 aa, 280 aa, 281 aa, 282 aa, 283 aa, 284 aa, 285 aa, 286 aa, 287 aa, 288 aa, 289 aa, or 290 au. In some cases, an MHC Class I heavy chain polypeptide present in a TMMP of the present disclosure comprises 1-30, 1-5, 5-10, 10-15, 15-20, 20-25 or 25-30 amino acid insertions, deletions, and/or substitutions (in addition to those locations indicated as being variable in the heavy chain consensus sequences) of any one of the amino acid sequences depicted in FIGS. 7-13. In some cases, the MHC Class I heavy chain does not include transmembrane or cytoplasmic domains. As an example, a MHC Class I heavy chain polypeptide of a TMMP of the present disclosure can comprise an amino acid sequence having at least 75%, at least 80%, at least 85%, at least 90%, at least 95%, at least 98%, at least 99%, or 100%, amino acid sequence identity to amino acids 25-300 (lacking all, or substantially all, of the leader, transmembrane and cytoplasmic sequence) or amino acids 25-365 (lacking the leader) of a human HLA-A heavy chain polypeptides depicted in any one of FIGS. 7A, 7B, and 7C.

[0089] FIGS. 7A, 7B and 7C provide amino acid sequences of human leukocyte antigen (HLA) Class I heavy chain polypeptides. Signal sequences, amino acids 1-24, are bolded and underlined. FIG. 7A entry: 3A.1 is the HLA-A heavy chain (HLA-A*01:01:01:01 or A*0101) (NCBI accession NP_001229687.1), SEQ ID NO:23; entry 3A.2 is from HLA-A*1101 SEQ ID NO:24; entry 3A.3 is from HLA-A*2402 SEQ ID NO:25 and entry 3A.4 is from HLA-A*3303 SEQ ID NO:26. FIG. 7B provides the sequence HLA-B*07:02:01 (HLA-B*0702) NCBI GenBank Accession NP_005505.2 (see also GenBank Accession AUV50118.1.). FIG. 7C provides the sequence HLA-C*0701 (GenBank Accession NP_001229971.1) (HLA-C*07:01:01:01 or HLA-Cw*070101, HLA-Cw*07 see GenBank Accession CAO78194.1).

[0090] FIG. 8 provides an alignment of eleven mature MHC class I heavy chain amino acid sequences without their leader sequences or transmembrane domains or intracellular domains. The aligned sequences are human HLA-A, HLA-B, and HLA-C, a mouse H2K protein sequence, three variants of HLA-A (var.1, var. 2C, and var.2CP), and 3 human HLA-A variants (HLA-A*1101; HLA-A*2402; and HLA-A*3303). Indicated in the alignment are the locations (84 and 139 of the mature proteins) where cysteine residues may be introduced (e.g., by substitution) for the formation of a disulfide bond to stabilize the MHC H chain—β2M complex. Also shown in the alignment is position 236 (of the mature polypeptide), which may be substituted by a cysteine residue that can form an inter-chain disulfide bond with β2M (e.g., at aa12). An arrow appears above each of those locations and the residues are bolded. The seventh HLA-A sequence shown in the alignment (var. 2c), shows the sequence of variant 2 substituted with C residues at positions 84, 139 and 236. The boxes flanking residues 84, 139 and 236 show the groups of five amino acids on either sides of those six sets of five residues, denoted aac1 (for “amino acid cluster 1”), aac2 (for “amino acid cluster 2”), aac3 (for “amino acid cluster 3”), aac4 (for “amino acid cluster 4”), aac5 (for “amino acid cluster 5”), and aac6 (for “amino acid cluster 6”), that may be replaced by 1 to 5 amino acids selected independently from (i) any naturally occurring amino acid or (ii) any naturally occurring amino acid except proline or glycine.

[0091] With regard to FIG. 8, in some cases: i) aac1 (amino acid cluster 1) may be the amino acid sequence GTLRG (SEQ ID NO:287) or that sequence with one or two amino acids deleted or substituted with other naturally occurring amino acids (e.g., L replaced by I, V, A or F); ii) aac2 (amino acid cluster 2) may be the amino acid sequence YNQSE (SEQ ID NO:288) or that sequence with one or two amino acids deleted or substituted with other naturally occurring amino acids (e.g., N replaced by Q, Q replaced by N, and/or E replaced by D); iii) aac3 (amino acid cluster 3) may be the amino acid sequence TAADM (SEQ ID NO:289) or that sequence with one or two amino acids deleted or substituted with other naturally occurring amino acids (e.g., T replaced by S, A replaced by G. D replaced by E, and/or M replaced by L, V, or I); iv) aac4 (amino acid cluster 4) may be the amino acid sequence AQTTK (SEQ ID NO:290) or that sequence with one or two amino acids deleted or substituted with other naturally occurring amino acids (e.g., A replaced by G, Q replaced by N, or T replaced by S, and/or K replaced by R or Q); v) aac5 (amino acid cluster 5) may be the amino acid sequence VETRP (SEQ ID NO:291) or that sequence with one or two amino acids deleted or substituted with other naturally occurring amino acids (e.g., V replaced by I or L, E replaced by D, T replaced by S, and/or R replaced by K); and/or vi) aac6 (amino acid cluster 6) may be the amino acid sequence GDGTF (SEQ ID NO:292) or that sequence with one or two amino acids deleted or substituted with other naturally occurring amino acids (e.g., D replaced by E. T replaced by S, or F replaced by L, W, or Y).

[0092] FIGS. 9-11 provide alignments of mature HLA class I heavy chain amino acid sequences (without leader sequences or transmembrane domains or intracellular domains). The aligned amino acid sequences in FIG. 9A are HLA-A class I heavy chains of the following alleles: A*0101, A*0201, A*0301, A*l 101, A*2301, A*2402, A*2407, A*3303, and A*3401. The aligned amino acid sequences in FIG. 10A are HLA-B class I heavy chains of the following alleles: B*0702, B*0801, B*1502, B*3802, B*4001, B*4601, and B*5301. The aligned amino acid sequences in FIG. 11A are HLA-C class I heavy chains of the following alleles: C*0102, C*0303, C*0304, C*0401, C*0602, C*0701, C*0801, and C*1502. Indicated in the alignments are the locations (84 and 139 of the mature proteins) where cysteine residues may be introduced (e.g., by substitution) for the formation of a disulfide bond to stabilize the HLA H chain—β2M complex. Also shown in the alignment is position 236 (of the mature polypeptide), which may be substituted by a cysteine residue that can form an inter-chain disulfide bond with β2M (e.g., at aa12). The boxes flanking residues 84, 139 and 236 show the groups of five amino acids on either sides of those six sets of five residues, denoted aac1 (for “amino acid cluster 1”), aac2 (for “amino acid cluster 2”), aac3 (for “amino acid cluster 3”), aac4 (for “amino acid cluster 4”), aac5 (for “amino acid cluster 5”), and aac6 (for “amino acid cluster 6”), that may be replaced by 1 to 5 amino acids selected independently from (i) any naturally occurring amino acid or (ii) any naturally occurring amino acid except proline or glycine.

[0093] FIGS. 9A, 10A, and 11A provide alignments of the amino acid sequences of mature HLA-A, —B, and -C class I heavy chains, respectively. The sequences are provided for the extracellular portion of the mature protein (without leader sequences or transmembrane domains or intracellular domains). As described in FIG. 8, the positions of aa residues 84, 139, and 236 and their flanking residues (aac1 to aac6) that may be replaced by 1 to 5 amino acids selected independently from (i) any naturally occurring amino acid or (ii) any naturally occurring amino acid except proline or glycine ae also shown. FIGS. 9B, 10B, and 11B provide consensus amino acid sequences for the HLA-A, —B, and -C sequences, respectively, provide in FIGS. 9A, 10A, and 11A. The consensus sequences show the variable amino acid positions as “X” residues sequentially numbered and the locations of amino acids 84, 139 and 236 double underlined.

[0094] With regard to FIG. 9A, in some cases: i) aac1 (amino acid cluster 1) may be the amino acid sequence GTLRG (SEQ ID NO:287) or that sequence with one or two amino acids deleted or substituted with other naturally occurring amino acids (e.g., L replaced by I, V, A or F); ii) aac2 (amino acid cluster 2) may be the amino acid sequence YNQSE (SEQ ID NO:288) or that sequence with one or two amino acids deleted or substituted with other naturally occurring amino acids (e.g., N replaced by Q, Q replaced by N, and/or E replaced by D); iii) aac3 (amino acid cluster 3) may be the amino acid sequence TAADM (SEQ ID NO:289) or that sequence with one or two amino acids deleted or substituted with other naturally occurring amino acids (e.g., T replaced by S, A replaced by G, D replaced by E, and/or M replaced by L, V, or I); iv) aac4 (amino acid cluster 4) may be the amino acid sequence AQTTK (SEQ ID NO:290) or that sequence with one or two amino acids deleted or substituted with other naturally occurring amino acids (e.g., A replaced by G, Q replaced by N, or T replaced by S, and or K replaced by R or Q); v) aac5 (amino acid cluster 5) may be the amino acid sequence VETRP (SEQ ID NO:291) or that sequence with one or two amino acids deleted or substituted with other naturally occurring amino acids (e.g., V replaced by I or L, E replaced by D, T replaced by S, and/or R replaced by K); and/or vi) aac6 (amino acid cluster 6) may be the amino acid sequence GDGTF (SEQ ID NO:292) or that sequence with one or two amino acids deleted or substituted with other naturally occurring amino acids (e.g., D replaced by E. T replaced by S, or F replaced by L, W, or Y).

[0095] With regard to FIG. 10A, in some cases: i) aac1 (amino acid cluster 1) may be the amino acid sequence RNLRG (SEQ ID NO:293) or that sequence with one or two amino acids deleted or substituted with other naturally occurring amino acids (e.g., N replaced by T or I; and/or L replaced by A; and/or the second R replaced by L; and/or the G replaced by R); ii) aac2 (amino acid cluster 2) may be the amino acid sequence YNQSE (SEQ ID NO:288) or that sequence with one or two amino acids deleted or substituted with other naturally occurring amino acids (e.g., N replaced by Q, Q replaced by N, and/or E replaced by D); iii) aac3 (amino acid cluster 3) may be the amino acid sequence TAADT (SEQ ID NO:294) or that sequence with one or two amino acids deleted or substituted with other naturally occurring amino acids (e.g., the first T replaced by S; and/or A replaced by G; and/or D replaced by E; and/or the second T replaced by S); iv) aac4 (amino acid cluster 4) may be the amino acid sequence AQITQ (SEQ ID NO:295) or that sequence with one or two amino acids deleted or substituted with other naturally occurring amino acids (e.g., A replaced by G; and/or the first Q replaced by N; and/or I replaced by L or V; and/or the T replaced by S; and/or the second Q replaced by N); v) aac5 (amino acid cluster 5) may be the amino acid sequence VETRP (SEQ ID NO:291) or that sequence with one or two amino acids deleted or substituted with other naturally occurring amino acids (e.g., V replaced by I or L, E replaced by D, T replaced by S, and/or R replaced by K); and/or vi) aac6 (amino acid cluster 6) may be the amino acid sequence GDRTF (SEQ ID NO:296) or that sequence with one or two amino acids deleted or substituted with other naturally occurring amino acids (e.g., D replaced by E; and/or T replaced by S; and/or R replaced by K or H; and/or F replaced by L, W, or Y).

[0096] With regard to FIG. 11A, in some cases: i) aac1 (amino acid cluster 1) may be the amino acid sequence RNLRG (SEQ ID NO:293) or that sequence with one or two amino acids deleted or substituted with other naturally occurring amino acids (e.g., N replaced by K; and/or L replaced by A or I; and/or the second R replaced by H; and/or the G replaced by T or S); ii) aac2 (amino acid cluster 2) may be the amino acid sequence YNQSE (SEQ ID NO:288) or that sequence with one or two amino acids deleted or substituted with other naturally occurring amino acids (e.g., N replaced by Q, Q replaced by N. and/or E replaced by D); iii) aac3 (amino acid cluster 3) may be the amino acid sequence TAADT (SEQ ID NO:294) or that sequence with one or two amino acids deleted or substituted with other naturally occurring amino acids (e.g., the first T replaced by S; and/or A replaced by G; and/or D replaced by E; and/or the second T replaced by S); iv) aac4 (amino acid cluster 4) may be the amino acid sequence AQITQ (SEQ ID NO:295) or that sequence with one or two amino acids deleted or substituted with other naturally occurring amino acids (e.g., A replaced by G; and/or the first Q replaced by N; and/or I replaced by L; and/or the second Q replaced by N or K); v) aac5 (amino acid cluster 5) may be the amino acid sequence VETRP (SEQ ID NO:291) or that sequence with one or two amino acids deleted or substituted with other naturally occurring amino acids (e.g., V replaced by I or L, E replaced by D, T replaced by S, and/or R replaced by K or H); and/or vi) aac6 (amino acid cluster 6) may be the amino acid sequence GDGTF (SEQ ID NO:292) or that sequence with one or two amino acids deleted or substituted with other naturally occurring amino acids (e.g., D replaced by E; and/or T replaced by S; and/or F replaced by L, W, or Y).

### HLA-A

[0097] In some cases, a TMMP of the present disclosure comprises an HLA-A heavy chain polypeptide. The HLA-A heavy chain peptide sequences, or portions thereof, that may be that may be incorporated into a TMMP of the present disclosure include, but are not limited to, the alleles: A*0101, A*0201, A*0301, A*1101, A*2301, A*2402, A*2407, A*3303, and A*3401, which are aligned without all, or substantially all, of the leader, transmembrane and cytoplasmic sequences in FIG. 9A. Any of those alleles may comprise a mutation at one or more of positions 84, 139 and/or 236 (as shown in FIG. 9A) selected from: a tyrosine to alanine at position 84 (Y84A); a tyrosine to cysteine at position 84 (Y84C); an alanine to cysteine at position 139 (A139C); and an alanine to cysteine substitution at position 236 (A236C). In addition, HLA-A sequence having at least 75% (e.g., at least 80%, at least 85%, at least 90%, at least 95%, at least 98%, at least 99%) or 100% amino acid sequence identity to all or part (e.g., 50, 75, 100, 150, 200, or 250 contiguous amino acids) of the sequence of those HLA-A alleles may also be employed (e.g., it may comprise 1-25, 1-5, 5-10, 10-15, 15-20, 20-25, or 25-30 amino acid insertions, deletions, and/or substitutions).

[0098] In some cases, a TMMP of the present disclosure comprises an HLA-A heavy chain polypeptide comprising the following HLA-A consensus amino acid sequence:

(SEQ ID NO: 29)
GSHSMRYFX1TSVSRPGRGEPRFIAVGYVDDTQFVRFDSDAASQX2MEPRA
PWIEQEGPEYWDX3X4TX5X6X7KAX8SQX9X10RX11X12LX13X14X15
X16X17YYNQSEX18GSHTX19QX20MX21GCDVGX22DX23RFLRGYX24
QX25AYDGKDYIALX26EDLRSWTAADMAAQX27TX287X29KWEX30X31
X32EAEQX33RX34YLX35GX36CVX37X38LRRYLENGKETLQRTDX39P
KTHMTHHX40X41SDHEATLRCWALX42FYPAEITLTWQRDGEDQTQDTEL
VETRPAGDGTFQKWAX43VVVPSGX44EQRYTCHVQHEGLPKPLTLRWE
X45,
wherein X1 is F, Y, S, or T; X2 is K or R; X3 is Q,
G, E, or R; X4 is N or E; X5 is R or G; X6 is N or
K; X7 is M or V; X8 is H or Q; X9 is T or I; X10 is
D or H; X11 is A, V, or E; X12 is N or D; X13 is G
or R; X14 is T or I; X15 is L or A; X16 is R or L;
X17 is G or R; X18 is A or D; X19 is I, L, or V;
X20 is I, R or M; X21 is F or Y; X22 is S or P; X23
is W or G; X24 is R, H, or Q; X25 is D or Y; X26 is
N or K; X27 is T or I; X28 is K or Q; X29 is R or
H; X30 is A or T; X31 is A or V; X32 is H or R; X33
is R, L, Q, or W; X34 is V or A; X35 is D or E; X36
is R or T; X37 is D or E; X38 is W or G; X39 is P
or A; X40 is P or A; X41 is V or I; X42 is S or G;
X43 is A or S; X44 is Q or E; and X45 is P or L.

[0099] As one example, an MHC Class I heavy chain polypeptide of a TMMP can comprise an amino acid sequence having at least 75%, at least 80%, at least 85%, at least 90%, at least 95%, at least 98%, at least 99%, or 100%, amino acid sequence identity to the following human HLA-A heavy chain amino acid sequence:

(SEQ ID NO: 297)
[sequence omitted]

[0100] In some cases, an HLA-A heavy chain polypeptide suitable for inclusion in a TMMP of the present disclosure comprises the following amino acid sequence: GSHSMRYFFTSVSRPGRGEPRFIAVGYVDDTQFVRFDSDAASQRMEPRAPWIEQEGPEYWDGET RKVKAHSQTHRVDLGTLRGYYNQSEAGSHTVQRMYGCDVGSDWRFLRGYHQYAYDGKDYIA LKEDLRSWTAADMAAQTTKHKWEAAHVAEQLRAYLEGTCVEWLRRYLENGKETLQRTDAPK THMTHHAVSDHEATLRCWALSFYPAEITLTWQRDGEDQTQDTELVETRPAGDGTFQKWAAVV VPSGQEQRYTCHVQHEGLPKPLTLRWEP (SEQ ID NO:297). This HLA-A heavy chain polypeptide is also referred to as “HLA-A*0201” or simply “HLA-A02.” In some cases, the C-terminal Pro is not included in a TMMP of the present disclosure. For example, in some cases, an HLA-A02 polypeptide suitable for inclusion in a TMMP of the present disclosure comprises the following amino acid sequence:

(SEQ ID NO: 449)
[sequence omitted]

### HLA-A (Y84A; A236C)

[0101] In some cases, the MHC Class I heavy chain polypeptide comprises Y84A and A236C substitutions. For example, in some cases, the MHC Class I heavy chain polypeptide comprises an amino acid sequence having at least 75%, at least 80%, at least 85%, at least 90%, at least 95%, at least 98%, at least 99%, or 100%, amino acid sequence identity to the following human HLA-A heavy chain (Y84A; A236C) amino acid sequence: GSHSMRYFFTSVSRPGRGEPRFIAVCGYVDDTQFVRFDSDAASQRMEPRAPWIEQEGPEYWDGET RKVKAHSQTHRVDLGTLRGAYNQSEAGSHTVQRMYGCDVGSDWRFLRGYHQYAYDGKDYIA LKEDLRSWTAADMAAQTTKHKWEAAHVAEQLRAYLEGTCVEWLRRYLENGKETLQRTDAPK THMTHHAVSDHEATLRCWALSFYPAEITLTWQRDGEDQTQDTELVETRPCGDGTFQKWAAVV VPSGQEQRYTCHVQHEGLPKPLTLRWEP (SEQ ID NO:298), where amino acid 84 is Ala and amino acid 236 is Cys. In some cases, the Cys-236 forms an interchain disulfide bond with Cys-12 of a variant β2M polypeptide that comprises an R12C substitution.

[0102] In some cases, an HLA-A heavy chain polypeptide suitable for inclusion in a TMMP of the present disclosure is an HLA-A02 (Y84A; A236C) polypeptide comprising the following amino acid sequence:

(SEQ ID NO: 298)
GSHSMRYFFTSVSRPGRGEPRFIAVGYVDDTQFVRFDSDAASQRMEPRAPW
IEQEGPEYWDGETRKVKAHSQTHRVDLGTLRGAYNQSEAGSHTVQRMYGCD
VGSDWRFLRGYHQYAYDGKDYIALKEDLRSWTAADMAAQTTKHKWEAAHVA
EQLRAYLEGTCVEWLRRYLENGKETLQRTDAPKTHMTHHAVSDHEATLRCW
ALSFYPAEITLTWQRDGEDQTQDTELVETRPCGDGTFQKWAAVVVPSGQEQ
RYTCHVQHEGLPKPLTLRWEP.

[0103] In some cases, an HLA-A heavy chain polypeptide suitable for inclusion in a TMMP of the present disclosure is an HLA-A02 (Y84A; A236C) polypeptide comprising the following amino acid sequence:

(SEQ ID NO: 450)
GSHSMRYFFTSVSRPGRGEPRFIAVGYVDDTQFVRFDSDAASQRMEPRAPW
IEQEGPEYWDGETRKVKAHSQTHRVDLGTLRGAYNQSEAGSHTVQRMYGCD
VGSDWRFLRGYHQYAYDGKDYIALKEDLRSWTAADMAAQTTKHKWEAAHVA
EQLRAYLEGTCVEWLRRYLENGKETLQRTDAPKTHMTHHAVSDHEATLRCW
ALSFYPAEITLTWQRDGEDQTQDTELVETRPCGDGTFQKWAAVVVPSGQEQ
RYTCHVQHEGLPKPLTLRWE.

### HLA-A (Y84C; A139C)

[0104] In some cases, the MHC Class I heavy chain polypeptide comprises Y84C and A139C substitutions. For example, in some cases, the MHC Class I heavy chain polypeptide comprises an amino acid sequence having at least 75%, at least 80%, at least 85%, at least 90%, at least 95%, at least 98%, at least 99%, or 100%, amino acid sequence identity to the following human HLA-A heavy chain (Y84C; A139C) amino acid sequence: GSHSMRYFFTSVSRPORGEPRFIAVGYVDDTQFVRFDSDAASQRMEPRAPWIEQEGPEYWDGET RKVKAHSQTHRVDLGTLRGCYNQSEAGSHTVQRMYGCDVGSDWRFLRGYHQYAYDGKDYIA LKEDLRSWTAADMCAQTTKHKWEAAHVAEQLRAYLEGTCVEWLRRYLENGKETLQRTDAPK TIIMTIIHIAVSDHEATLRCWALSFYPAEITLTWQRDGEDQTQDTELVETRPAGDGTFQKWAAVV VPSGQEQRYTCHVQHIEGLPKPLTLRWEP (SEQ ID NO:299), where amino acid 84 is Cys and amino acid 139 is Cys. In some cases, Cys-84 forms an intrachain disulfide bond with Cys-139.

### HLA-A11 (HLA-A*1101)

[0105] As one non-limiting example, an MHC Class I heavy chain polypeptide of a TMMP can comprise an amino acid sequence having at least 75%, at least 80%, at least 85%, at least 90%, at least 95%, at least 98%, at least 99%, or 100%, amino acid sequence identity to the following human HLA-A11 heavy chain amino acid sequence: GSHSMRYFYTSVSRPGRGEPRFIAVGYVDDTQFVRFDSDAASQRMEPRAPWIEQEGPEYWDQE TRNVKAQSQTDRVDLGTLRGYYNQSEDGSHTIQIMYGCDVGPDGRFLRGYRQDAYDGKDYIA LNEDLRSWTAADMAAQITKRKWEAAHAAEQQRAYLEGTCVEWLRRYLENGKETLQRTDPPKT HMTHHPISDHEATLRCWALGFYPAEITLTWQRDGEDQTQDTELVETRPAGDGTFQKWAAVVV PSGEEQRYTCHVQHEGLPKPLTLRWE (SEQ ID NO:300). Such an MHC Class I heavy chain may be prominent in Asian populations, including populations of individuals of Asian descent.

### HLA-A11 (Y84A; A236C)

[0106] As one non-limiting example, in some cases, the MHC Class I heavy chain polypeptide is an HLA-A11 allele that comprises Y84A and A236C substitutions. For example, in some cases, the MHC Class I heavy chain polypeptide comprises an amino acid sequence having at least 75%, at least 80%, at least 85%, at least 90%, at least 95%, at least 98%, at least 99%, or 100%, amino acid sequence identity to the following human HLA-A A11 heavy chain (Y84A; A236C) amino acid sequence: GSHSMRYFYTSVSRPGRGEPRFIAVGYVDDTQFVRFDSDAASQRMEPRAPWIEQEGPEYWDQE TRNVKAQSQTDRVDLGTLRGAYNQSEDGSHTIQIMYGCDVGPDGRFLRGYRQDAYDGKDYIA LNEDLRSWTAADMAAQLTKRKWEAAHAAEQQRA YLEGTCVEWLRRYLENGKETLQRTDPPKT HMTHHPISDHEATLRCWALGFYPAEITLTWQRDGEDQTQDTELVETRPCGDGTFQKWAAVVV PSGEEQRYTCHVQHEGLPKPLTLRWE (SEQ ID NO:301), where amino acid 84 is Ala and amino acid 236 is Cys. In some cases, the Cys-236 forms an interchain disulfide bond with Cys-12 of a variant β2M polypeptide that comprises an R12C substitution.

### HLA-A24 (HLA-A*2402)

[0107] As one non-limiting example, an MHC Class I heavy chain polypeptide of a TMMP of the present disclosure can comprise an amino acid sequence having at least 75%, at least 80%, at least 85%, at least 90%, at least 95%, at least 98%, at least 99%, or 100%, amino acid sequence identity to the following human HLA-A24 heavy chain amino acid sequence: GSHSMRYFSTSVSRPGRGEPRFIAVGYVDDTQFVRFDSDAASQRMEPRAPWIEQEGPEYWDEET GKVKAHSQTDRENLRIALRYYNQSEAGSHTLQMMFGCDVGSDGRFLRGYHQYAYDGKDYIAL KEDLRSWTAADMAAQITKRKWEAAHVAEQQRAYLEGTCVDGLRRYLENGKETLQRTDPPKT HMTHHPISDHEATLRCWALGFYPAEITLTWQRDGEDQTQDTELVETRPAGDGTFQKWAAVVV PSGEEQRYTCHVQHEGLPKPLTLRWEPSSQPTVPIVGIIAGLVLLGAVITGAVVAAVMWRRNSS DRKGGSYSQAASSDSAQGSDVSLTACKV (SEQ ID NO:302). Such an MHC Class I heavy chain may be prominent in Asian populations, including populations of individuals of Asian descent. In some cases, amino acid 84 is an Ala. In some cases, amino acid 84 is a Cys. In some cases, amino acid 236 is a Cys. In some cases, amino acid 84 is an Ala and amino acid 236 is a Cys. In some cases, amino acid 84 is an Cys and amino acid 236 is a Cys.

### HLA-A33 (HLA-A*3303)

[0108] As one non-limiting example, an MHC Class I heavy chain polypeptide of a TMMP of the present disclosure can comprise an amino acid sequence having at least 75%, at least 80%, at least 85%, at least 90%, at least 95%, at least 98%, at least 99%, or 100%, amino acid sequence identity to the following human HLA-A33 heavy chain amino acid sequence: GSHSMRYFTTSVSRPGRGEPRFIAVGYVDDTQFVRFDSDAASQRMEPRAPWIEQEGPEYWDRN TRNVKAHSQIDRVDLGTLRGYYNQSEAGSHTIQMMYGCDVGSDGRFLRGYQQDAYDGKDYIA LNEDLRSWTAADMAAQITQRKWEAARVAEQLRAYLEGTCVEWLRRYLENGKETLQRTDPPKT HMTHHAVSDHEATLRCWALSFYPAEITLTWQRDGEDQTQDTELVETRPAGDGTFQKWASVVV PSGQEQRYTCHVQHFGLPKPITIRWEPSSQPTIPIVGIIAGLVLFGAVFAGAVVAAVRWRRKSSID RKGGSYSQAASSDSAQGSDMSLTACKV (SEQ ID NO:303). Such an MHC Class I heavy chain may be prominent in Asian populations, including populations of individuals of Asian descent. In some cases, amino acid 84 is an Ala. In some cases, amino acid 84 is a Cys. In some cases, amino acid 236 is a Cys. In some cases, amino acid 84 is an Ala and amino acid 236 is a Cys. In some cases, amino acid 84 is an Cys and amino acid 236 is a Cys.

### HLA-B

[0109] In some cases, a TMMP of the present disclosure comprises an HLA-B heavy chain polypeptide. The HLA-B heavy chain peptide sequences, or portions thereof, that may be that may be incorporated into a TMMP of the present disclosure include, but are not limited to, the alleles: B*0702, B*0801, B*1502, B*3802, 13*4001, B*4601, and 13*5301, which are aligned without all, or substantially all, of the leader, transmembrane and cytoplasmic sequences in FIG. 10A. Any of those alleles may comprise a mutation at one or more of positions 84, 139 and/or 236 (as shown in FIG. 10A) selected from: a tyrosine to alanine at position 84 (Y84A); a tyrosine to cysteine at position 84 (Y84C); an alanine to cysteine at position 139 (A139C); and an alanine to cysteine substitution at position 236 (A236C). In addition, a HLA-B polypeptide comprising an amino acid sequence having at least 75% (e.g., at least 80%, at least 85%, at least 90%, at least 95%, at least 98%, at least 99%) or 100% amino acid sequence identity to all or part (e.g., 50, 75, 100, 150, 200, or 250 contiguous amino acids) of the sequence of those HLA-B alleles may also be employed (e.g., it may comprise 1-25, 1-5, 5-10, 10-15, 15-20, 20-25, or 25-30 amino acid insertions, deletions, and/or substitutions).

[0110] In some cases, a TMMP of the present disclosure comprises an HLA-B heavy chain polypeptide comprising the following HLA-B consensus amino acid sequence:

(SEQ ID NO: 30)
GSHSMRYFX1TX2X3SRPGRGEPRFIX4VGYVDDTX5FVRFDSDAX6SPR
X7X8PRAPWIEQEGPEYWDRX9TQX10X11KTX12X13TQX14YX15X16N
LX17X18X19X20YYNQSEAGSHCX21X22QX23MYGCDLGPDGRLLRGHD
QSAYDGKDYIALNEDLX24SWTAADTAAQIX25QRKX26EAARX27AEQ
X28RX29YLEGX30CVEWLRRYLENGKX31X32LX33RADPPKTHVTHHP
X34SDHEATLRCWALGFYPAEITLTWQRDGEDQTQDTELVETRPAGDRTFQ
KWAAVVVPSGEEQRYTCHVQHEGLPKPLTLRWEP,
wherein X1 is H, Y, or D; X2 is A or S; X3 is M or
V; X4 is A, S, or T; X5 is Q or L; X6 is A or T; X7
is E, M K, or T; X8 is A or T; X9 is E or N; X10 is
I or K; X11 is Y, F, S, or C; X12 is N or Q; X13 is
A or T; X14 is D or Y; X15 is E or V; X16 is S or
N; X17 is T, N, or I; X18 is A or L; X19 is L, or
R; X20 is R or G; X21 is T or I; X22 is L or I; X23
is R or S; X24 is R or S; X25 is S or T; X26 is L
or W; X27 is E OR V; X28 is R, D, L or W; X29 is A
or T; X30 is L, E or T; X31 is E or D; X32 is K or
T; X33 is E or Q; and X34 is I or V.

[0111] As an example, an MHC Class I heavy chain polypeptide of a TMMP of the present disclosure can comprise an amino acid sequence having at least 75%, at least 80%, at least 85%, at least 90%, at least 95%, at least 98%, at least 99%, or 100%, amino acid sequence identity to the following human HLA-B heavy chain amino acid sequence:

(SEQ ID NO: 304)
GSIISMRYFYTSVSRPGRGEPREISVGYVDDTQFVREDSDAASPREEPRA
PWIEQEGPEYWDRNTQIYKAQAQTDRESLRNLRGYYNQSEAGSHTLQSMY
GCDVGPDGRLLRGHDQYAYDGKDYIALNEDLRSWTAADTAAQITQRKWEA
AREAEQRRAYLEGECVEWLRRYLENGKDKLERADPPKTHVTHHPISDHEA
TLRCWALGFYPAEITLTWQRDGEDQTQDTELVETRPAGDRTFQKWAAVVV
PSGEEQRYTCHVQHEGLPKPLTLRWEP.

### HLA-B (Y84A; A236C)

[0112] As one non-limiting example, in some cases, the MHC Class I heavy chain polypeptide is an HLA-B polypeptide that comprises Y84A and A236C substitutions. For example, in some cases, the MHC Class I heavy chain polypeptide comprises an amino acid sequence having at least 75%, at least 80%, at least 85%, at least 90%, at least 95%, at least 98%, at least 99%, or 100%, amino acid sequence identity to the following human HLA-B heavy chain (Y84A; A236C) amino acid sequence: GSHSMRYFYTSVSRPGRGEPRFISVGYVDDTQFVRFDSDAASPREEPRAPWIEQEGPEYWDRNT QIYKAQAQTDRESLRNLRGAYNQSEAGSHTLQSMYGCDVGPDORLLRGHDQYAYDGKDYIAL NEDLRSWTAADTAAQITQRKWEAAREAEQRRAYLEGECVEWLRRYLENGKDKLERADPPKTH VTHHPISDIIEATLRCWALGFYPAEITLTWQRDGEDQTQDTELVETRPCGDRTFQKWAAVVVPS GEEQRYTCHVQHEGLPKPLTLRWEP (SEQ ID NO:305), where amino acid 84 is Ala and amino acid 236 is Cys. In some cases, the Cys-236 forms an interchain disulfide bond with Cys-12 of a variant β2M polypeptide that comprises an R12C substitution.

### HLA-B (Y84C; A139C)

[0113] In some cases, the MHC Class I heavy chain polypeptide comprises Y84C and A139C substitutions. For example, in some cases, the MHC Class I heavy chain polypeptide comprises an amino acid sequence having at least 75%, at least 80%, at least 85%, at least 90%, at least 95%, at least 98%, at least 99%, or 100%, amino acid sequence identity to the following human HLA-B heavy chain (Y84C; A139C) amino acid sequence: GSHSMRYFYTSVSRPGRGEPRFISVGYVDDTQFVRFDSDAASPREEPRAPWIEQEGPEYWDRNT QIYKAQAQTDRESLRNLRGCYNQSEAGSHTLQSMYGCDVGPDGRLLRGHDQYAYDGKDYIAL NEDLRSWTAADTCAQITQRKWEAAREAEQRRAYLEGECVEWLRRYLENGKDKLERADPPKTH VTHHPISDHEATLRCWALGFYPAEITLTWQRDGEDQTQDTELVETRPAGDRTFQKWAAVVVPS GEEQRYTCHVQHEGLPKPLTLRWEP (SEQ ID NO:306), where amino acid 84 is Cys and amino acid 139 is Cys. In some cases, Cys-84 forms an intrachain disulfide bond with Cys-139.

### HLA-B*0702

[0114] As an example, in some cases, a MHC Class I heavy chain polypeptide present in a TMMP of the present disclosure comprises an amino acid sequence of HLA-B*0702 (SEQ ID NO:207) in FIG. 10A, or a sequence having at least 75% (e.g., at least 80%, at least 85%, at least 90%, at least 95%, at least 98%, at least 99%) or 100%, amino acid sequence identity to all or part (e.g., 50, 75, 100, 150, 200, or 250 contiguous amino acids) of that sequence (e.g., it may comprise 1-25, 1-5, 5-10, 10-15, 15-20, 20-25, or 25-30 amino acid insertions, deletions, and/or substitutions), In some cases, where the HLA-B heavy chain polypeptide of TMMP of the present disclosure has less than 100% identity to the sequence labeled HLA-B in FIG. 8, or labeled “B*0702 in FIG. 10A, it may comprise a mutation at one or more of positions 84, 139 and/or 236 selected from: a tyrosine to alanine substitution at position 84 (Y84A); a tyrosine to cysteine substitution at position 84 (Y84C); an alanine to cysteine at position 139 (A139C); and an alanine to cysteine substitution at position 236 (A236C). In some cases, the HL A-B heavy chain polypeptide of TMMP of the present disclosure comprises Y84A and A236C substitutions. In some cases, the HLA-B*0702 heavy chain polypeptide of TMMP of the present disclosure comprises Y84C and A139C substitutions. In some cases, the HLA-B heavy chain polypeptide of TMMP of the present disclosure comprises Y84C, A139C, and A236C substitutions.

### HLA-C

[0115] In some cases, a TMMP of the present disclosure comprises an HLA-C heavy chain polypeptide. The HLA-C heavy chain polypeptide, or portions thereof, that may be that may be incorporated into a TMMP of the present disclosure include, but are not limited to, the alleles: C*0102, C*0303, C*0304, C*0401, C*0602, C*0701, C*0801, and C*1502, which are aligned without all, or substantially all, of the leader, transmembrane and cytoplasmic sequences in FIG. 11A. Any of those alleles may comprise a mutation at one or more of positions 84, 139 and/or 236 (as shown in FIG. 11A) selected from: a tyrosine to alanine substitution at position 84 (Y84A); a tyrosine to cysteine substitution at position 84 (Y84C); an alanine to cysteine substitution at position 139 (A139C); and an alanine to cysteine substitution at position 236 (A236C). In addition, an HLA-C polypeptide comprising an amino acid sequence having at least 75% (e.g., at least 80%, at least 85%, at least 90%, at least 95%, at least 98%, at least 99%) or 100% amino acid sequence identity to all or part (e.g., 50, 75, 100, 150, 200, or 250 contiguous amino acids) of the sequence of those HLA-C alleles may also be employed (e.g., it may comprise 1-25, 1-5, 5-10, 10-15, 15-20, 20-25, or 25-30 amino acid insertions, deletions, and/or substitutions).

[0116] In some cases, a TMMP of the present disclosure comprises an HLA-C heavy chain polypeptide comprising the following HLA-C consensus amino acid sequence:

(SEQ ID NO: 31)
X1SHSMX2YFX3TAVSX4PGRGEPX5FIX6VGYVDDTQFVX7FDSDAASP
RGEPRX8PWVEQEGPEYWDRETQX9YKRQAQX10DRVX11LRX12LRGYY
NQSEX13X14SHX15X16QX17MX18GCDX19GPDGRLLRGX20X21QX2
2AYDGKDYIALNEDLRSWTAADTAAQITQRKX23EAARX24AEQX25RAY
LEGX26CVEWLRRYLX27NGKX28TLQRAEX29PKTHVTHHPX30SDHEA
TLRCWALGFYPAEITLTWQX31DGEDQTQDTELVETRPAGDGTFQKWAAV
X32VPSGX33EQRYTCHX34QHEGLX35EPLTLX36WX37P,
wherein
X1 is C or G; X2 is R or K; X3 is F, Y, S, or D;
X4 is R or W; X5 is H or R; X6 is A or S; X7 is
Q or R; X8 is A or E; X9 is N or K; X10 is T or A;
X11 is S or N; X12 is N or K; X13 is A or D;
X14 is G or R; X15 is T or I; X16 is L or I;
X17 is W or R; X18 is C, Y, F, or S; X19 is L, or
V; X20 is Y or H; X21 is D or N; X22 is Y, F, S,
or L; X23 is L or W; X24 is E, A, Or T; X25 is R,
L, or W; X26 is L or T; X27 is E OR K; X28 is E or
K; X29 is H or P; X30 is R or V; X31 is W or R;
X32 is V or M; X33 is E or Q; X34 is M or V;
X35 is P or Q; X36 is R or S; and X37 is P or G.

[0117] As an example, an MHC Class I heavy chain polypeptide of a TMMP of the present disclosure can comprise an amino acid sequence having at least 75%, at least 80%, at least 85%, at least 90%, at least 95%, at least 98%, at least 99%, or 100%, amino acid sequence identity to the following human HLA-C heavy chain amino acid sequence:

(SEQ ID NO: 307)
CSHSMRYFDTAVSRPGRGEPRFISVGYVDDTQFVRFDSDAASPRGEPRAP
WVEQEGPEYWDRETQNYKRQAQADRVSLRNLRGYYNQSEDGSHTLQRMYG
CDLGPDGRLLRGYDQSAYDGKDYIALNEDLRSWTAADTAAQITQRKLEAA
RAAEQLRAYLEGTCVEWLRRYLENGKETLQRAEPPKTHVTHHPLSDHEAT
LRCWALGFYPAEITLTWQRDGEDQTQDTELVETRPAGDGTFQKWAAVVVP
SGQEQRYTCHMQHEGLQEPLTLSWEP.

### HLA-C (Y84A; A236C)

[0118] As one non-limiting example, in some cases, the MHC Class I heavy chain polypeptide is an HLA-C polypeptide that comprises Y84A and A236C substitutions. For example, in some cases, the MHC Class I heavy chain polypeptide comprises an amino acid sequence having at least 75%, at least 80%, at least 85%, at least 90%, at least 95%, at least 98%, at least 99%, or 100%, amino acid sequence identity to the following human HLA-C heavy chain (Y84A; A236C) amino acid sequence: CSHSMRYFDTAVSRPGRGEPRFISVGYVDDTQFVRFDSDAASPRGEPRAPWVEQEGPEYWDRE TQNYKRQAQADRVSLRNLRGAYNQSEDGSHTLQRMYGCDLGPDGRLLRGYDQSAYDGKDYI ALNEDLRSWTAADTAAQITQRKLEAARAAEQLRAYLEGTCVEWLRRYLENGKETLQRAEPPKT HVTHHPLSDHEATLRCWALGFYPAEITLTWQRDGEDQTQDTELVETRPCGDGTFQKWAAVVV PSGQEQRYTCHMQHEGLQEPLTLSWEP (SEQ ID NO:308), where amino acid 84 is Ala and amino acid 236 is Cys. In some cases, the Cys-236 forms an interchain disulfide bond with Cys-12 of a variant β2M polypeptide that comprises an R12C substitution.

### HLA-C(Y84C; A139C)

[0119] In some cases, the MHC Class I heavy chain polypeptide comprises Y84C and A139C substitutions. For example, in some cases, the MHC Class I heavy chain polypeptide comprises an amino acid sequence having at least 75%, at least 80%, at least 85%, at least 90%, at least 95%, at least 98%, at least 99%, or 100%, amino acid sequence identity to the following human HLA-C heavy chain (Y84C; A139C) amino acid sequence: CSHSMRYFDTAVSRPGRGEPRFISVGYVDDTQFVRFDSDAASPRCEPRAPWVEQEGPEYWDRE TQNYKRQAQADRVSLRNLRGCYNQSEDGSHTLQRMYGCDLGPDGRLLRGYDQSAYDGKDYI ALNEDLRSWTAADTCAQITQRKLEAARAAEQLRAYLEGTCVEWLRRYLENGKETLQRAEPPKT HVTHHPLSDHEATLRCWALGFYPAEITLTWQRDGEDQTQDTELVETRPAGDGTFQKWAAVVV PSGQEQRYTCHMQHEGLQEPLTLSWEP (SEQ ID NO:397), where amino acid 84 is Cys and amino acid 139 is Cys. In some cases, Cys-84 forms an intrachain disulfide bond with Cys-139.

### HLA-C*0701

[0120] In some cases, a MHC Class I heavy chain polypeptide of a TMMP of the present disclosure comprises an amino acid sequence of HLA-C*0701 of FIG. 11A (labeled HLA-C in FIG. 8), or an amino acid sequence having at least 75% (e.g., at least 80%, at least 85%, at least 90%, at least 95%, at least 98%, at least 99%) or 100% amino acid sequence identity to all or part (e.g., 50, 75, 100, 150, 200, or 250 contiguous amino acids) of that sequence (e.g., it may comprise 1-25, 1-5, 5-10, 10-15, 15-20, 20-25, or 25-30 amino acid insertions, deletions, and/or substitutions). In some cases, where the HLA-C heavy chain polypeptide of a TMMP of the present disclosure has less than 100% identity to the sequence labeled HLA-C*0701 in FIG. 11A, it may comprise a mutation at one or more of positions 84, 139 and/or 236 selected from: a tyrosine to alanine substitution at position 84 (Y84A); a tyrosine to cysteine substitution at position 84 (Y84C); an alanine to cysteine at position 139 (A139C); and an alanine to cysteine substitution at position 236 (A236C). In some cases, the HLA-C heavy chain polypeptide of a TMMP of the present disclosure comprises Y84A and A236C substitutions. In some cases, the HLA-C*0701 heavy chain polypeptide of a T-Cell-MMP or its epitope conjugate comprises Y84C and A139C substitutions. In some cases, the HLA-C heavy chain polypeptide of a TMMP of the present disclosure comprises Y84C, A139C, and A236C substitutions.

### Non-Classical HLA-E, -F, and -G MHC Class I Heavy Chains

[0121] In some cases, a TMMP of the present disclosure comprises a non-classical MHC Class I heavy chain polypeptide. Among the non-classical HLA heavy chain polypeptides, or portions thereof, that may be that may be incorporated into a TMMP of the present disclosure include, but are not limited to, those of HLA-E, —F, and -G alleles. Amino acid sequences for HLA-E, —F, and -G heavy chain polypeptides, (and the HLA-A, B and C alleles) may be found on the world wide web hla.alleles.org/nomenclature/index.html, the European Bioinformatics Institute (www(dot)cbi(dot)ac(dot)uk), which is part of the European Molecular Biology Laboratory(EMBL), and at the National Center for Biotechnology Information (www(dot)ncbi(dot)nlm(dot)nih(dot)gov).

[0122] Non-limiting examples of suitable HLA-E alleles include, but are not limited to, HLA-E*0101 (HLA-E*01:01:01:01), HLA-E*01:03(HLA-E*01:03:01:01), HLA-E*01:04, HLA-E*01:05, HLA-E*01:06, HLA-E*01:07, HLA-E*01:09, and HLA-E*01:10. Non-limiting examples of suitable HLA-F alleles include, but are not limited to, HLA-F*0101 (HLA-F*01:01:01:01), HLA-F*01:02, HLA-F*01:03(HLA-F*01:03:01:01), HLA-F*01:04, HLA-F*01:05, and HLA-F*01:06. Non-limiting examples of suitable HLA-G alleles include, but are not limited to, HLA-G*0101 (HLA-G*01:01:01:01), HLA-G*01:02, HLA-G*01:03(HLA-G*01:03:01:01), HLA-G*01:04 (HLA-G*01:04:01:01), HLA-0*01:06, HLA-G*01:07, HLA-G*01:08, HLA-G*01:09: HLA-G*01:10, HLA-G*01:10, HLA-G*01:11, HLA-G*01:12, HLA-G*01:14, HLA-G*01:15, HLA-G*01:16, HLA-G*01:17, HLA-G*01:18: HLA-G*01:19, HLA-G*01:20, and HLA-G*01:22. Consensus sequences for those HLA E, —F and -G alleles without all, or substantially all, of the leader, transmembrane and cytoplasmic sequences are provided in FIG. 12, and aligned with consensus sequences of the above-mentioned HLA-A, —B and -C alleles in FIG. 13.

[0123] FIG. 12 provides a consensus sequence for each of HLA-E, —F, and -G with the variable aa positions indicated as “X” residues sequentially numbered and the locations of aas 84, 139 and 236 double underlined.

[0124] FIG. 13 provides an alignment of the consensus amino acid sequences for HLA-A, —B, -C, -E, -F, and -G, which are given in FIGS. 9-13. Variable residues in each sequence are listed as “X” with the sequential numbering removed. As indicated in FIG. 8, the locations of aas 84, 139 and 236 are indicated with their flanking five-amino acid clusters that may be replaced by 1 to 5 amino acids selected independently from (i) any naturally occurring amino acid or (ii) any naturally occurring amino acid except proline or glycine are also shown.

[0125] Any of the above-mentioned HLA-E, —F, and/or -G alleles may comprise a substitution at one or more of positions 84, 139 and/or 236 as shown in FIG. 13 for the consensus sequences. In some cases, the substitutions may be selected from a: position 84 tyrosine to alanine (Y84A) or cysteine (Y84C), or, in the case of HLA-F, an R84A or R84C substitution; a position 139 alanine to cysteine (A139C), or, in the case of HLA-F, a V139C; and an alanine to cysteine substitution at position 236 (A236C). In addition, an HLA-E, —F and/or -G sequence having at least 75% (e.g., at least 80%, at least 85%, at least 90%, at least 95%, at least 98%, at least 99%) or 100% amino acid sequence identity to all or part (e.g., 50, 75, 100, 150, 200, or 250 contiguous amino acids) of any of the consensus sequences of set forth in FIG. 13 may also be employed (e.g., the sequences may comprise 1-25, 1-5, 5-10, 10-15, 15-20, 20-25, or 25-30 amino acid insertions, deletions, and/or substitutions in addition to changes at variable residues listed therein).

### Mouse H2K

[0126] In some cases, a MHC Class I heavy chain polypeptide present in a TMMP of the present disclosure comprises an amino acid sequence of MOUSE H2K (SEQ ID NO:45) (MOUSE H2K in FIG. 8), or a sequence having at least 75%, at least 80%, at least 85%, at least 90%, at least 95%, at least 98%, at least 99%, or 100% amino acid sequence identity to all or part (e.g., 50, 75, 100, 150, 200, or 250 contiguous amino acids) of that sequence (e.g., it may comprise 1-25, 1-5, 5-10, 10-15, 15-20, 20-25, or 25-30 amino acid insertions, deletions, and/or substitutions). In some cases, where the MOUSE H2K heavy chain polypeptide of a TMMP of the present disclosure has less than 100% identity to the sequence labeled MOUSE H2K in FIG. 8, it may comprise a mutation at one or more of positions 84, 139 and/or 236 selected from: a tyrosine to alanine at position 84 (Y84A); a tyrosine to cysteine at position 84 (Y84C); an alanine to cysteine at position 139 (A139C); and an alanine to cysteine substitution at position 236 (A236C). In some cases, the MOUSE H2K heavy chain polypeptide of TMMP of the present disclosure comprises Y84A and A236C substitutions. In some cases, de MOUSE H2K heavy chain polypeptide of a TMMP of the present disclosure comprises Y84C and A139C substitutions. In some cases, the MOUSE H2K heavy chain polypeptide of a TMMP of the present disclosure comprises Y84C, A139C and A236C substitutions.

### Exemplary Combinations

[0127] Table 1, below, presents various combinations of MHC Class I heavy chain sequence modifications that can be incorporated in a TMMP of the present disclosure.

TABLE 1

| | | | Specific |
|---|---|---|---|
| | | | Substitutions at aa |
| | HLA Heavy | | positions 84, 139 |
| Entry | Chain Sequence | Sequence Identity Range [symbol] | and/or 236 |
| 1 | HLA-A | 75%-99.8%, 80%-99.8%, 85%-99.8%, | None; Y84C; Y84A; |
| | Consensus | 90%-99.8%, 95%-99.8%, 98%-99.8%, | A139C; A236C; |
| | (FIG. 9B) | or 99%-99.8%; or 1-25, 1-5, 5-10, 10-15, | (Y84A & A236C); |
| | | 15-20, or 20-25 aa insertions, | (Y84C & A139C); or |
| | | deletions, and/or substitutions (not | (Y84C, A139C & |
| | | counting variable residues) | A236C) |
| 2 | A*0101, A*0201, | 75%-99.8%, 80%-99.8%, 85%-99.8%, | None; Y84C; Y84A; |
| | A*0301, A*1101, | 90%-99.8%, 95%-99.8%, 98%-99.8%, | A139C; A236C; |
| | A*2402, A*2301, | or 99%-99.8%; or 1-25, 1-5, 5-10, 10-15, | (Y84A & A236C); |
| | A*2402, A*2407, | 15-20, or 20-25 aa insertions, | (Y84C& A139C); or |
| | A*3303, or | deletions, and/or substitutions | (Y84C, A139C & |
| | A*3401 | | A236C) |
| | (FIG. 9A) | | |
| 3 | HLA-B | 75%-99.8%, 80%-99.8%, 85%-99.8%, | None; Y84C; Y84A; |
| | Consensus | 90%-99.8%, 95%-99.8%, 98%-99.8%, | A139C; A236C; |
| | (FIG. 10B) | or 99%-99.8%; or 1-25, 1-5, 5-10, 10-15, | (Y84A & A236C); |
| | | 15-20, or 20-25 aa insertions, | (Y84C & A139C); or |
| | | deletions, and/or substitutions (not | (Y84C, A139C & |
| | | counting variable residues) | A236C) |
| 4 | B*0702, B*0801, | 75%-99.8%, 80%-99.8%, 85%-99.8%, | None; Y84C; Y84A; |
| | B*1502, B*3802, | 90%-99.8%, 95%-99.8%, 98%-99.8%, | A139C; A236C; |
| | B*4001, B*4601, | or 99%-99.8%; or 1-25, 1-5, 5-10, 10-15, | (Y84A & A236C); |
| | or B*5301 | 15-20, or 20-25 aa insertions, | (Y84C & A139C); or |
| | (FIG. 10A) | deletions, and/or substitutions | (Y84C, A139C & |
| | | | A236C) |
| 5 | HLA-C | 75%-99.8%, 80%-99.8%, 85%-99.8%, | None; Y84C; Y84A; |
| | Consensus | 90%-99.8%, 95%-99.8%, 98%-99.8%, | A139C; A236C; |
| | (FIG. 11B) | or 99%-99.8%; or 1-25, 1-5, 5-10, 10-15, | (Y84A & A236C); |
| | | 15-20, or 20-25 aa insertions, | (Y84C & A139C); or |
| | | deletions, and/or substitutions (not | (Y84C, A139C & |
| | | counting variable residues) | A236C) |
| 6 | C*0102, C*0303, | 75%-99.8%, 80%-99.8%, 85%-99.8%, | None; Y84C; Y84A; |
| | C*0304, C*0401, | 90%-99.8%, 95%-99.8%, 98%-99.8%, | A139C; A236C; |
| | C*0602, C*0701, | or 99%-99.8%; or 1-25, 1-5, 5-10, 10-15, | (Y84A & A236C); |
| | C*0801, or | 15-20, or 20-25 aa insertions, | (Y84C & A139C); or |
| | C*1502 | deletions, and/or substitutions | (Y84C, A139C & |
| | (FIG. 11A) | | A236C) |
| 7 | HLA-E, F, or G | 75%-99.8%, 80%-99.8%, 85%-99.8%, | None; Y84C; Y84A; |
| | Consensus | 90%-99.8%, 95%-99.8%, 98%-99.8%, | A139C; A236C; |
| | (FIG. 12) | or 99%-99.8%; or 1-25, 1-5, 5-10, 10-15, | (Y84A & A236C); |
| | | 15-20, or 20-25 aa insertions, | (Y84C & A139C); or |
| | | deletions, and/or substitutions (not | (Y84C, A139C & |
| | | counting variable residues) | A236C) |
| 8 | MOUSE H2K | 75%-99.8%, 80%-99.8%, 85%-99.8%, | None; Y84C; Y84A; |
| | (FIG. 8) | 90%-99.8%, 95%-99.8%, 98%-99.8%, | A139C; A236C; |
| | | or 99%-99.8%; or 1-25, 1-5, 5-10, 10-15, | (Y84A & A236C); |
| | | 15-20, or 20-25 aa insertions, | (Y84C & A139C); or |
| | | deletions, and/or substitutions | (Y84C, A139C & |
| | | | A236C) |

[symbol]

The Sequence Identity Range is the permissible range in sequence identity of a MHC-H polypeptide sequence incorporated into a TMMP relative to the corresponding portion of the sequences listed in FIG. 8-13 not counting the variable residues in the consensus sequences.

### Beta-2 Microglobulin

[0128] A β2-microglobulin (β2M) polypeptide of a TMMP of the present disclosure can be a human β2M polypeptide, a non-human primate β2M polypeptide, a murine β2M polypeptide, and the like. In some instances, a β2M polypeptide comprises an amino acid sequence having at least 75%, at least 80%, at least 85%, at least 90%, at least 95%, at least 98%, at least 99%, or 100%, amino acid sequence identity to a β2M amino acid sequence depicted in FIG. 6. In some instances, a β2M polypeptide comprises an amino acid sequence having at least 75%, at least 80%, at least 85%, at least 90%, at least 95%, at least 98%, at least 99%, or 100%, amino acid sequence identity to amino acids 21 to 119 of a β2M amino acid sequence depicted in FIG. 6.

[0129] In some cases, a suitable β2M polypeptide comprises the following amino acid sequence:

[0130] IQRTPKIQVYSCHPAENGKSNFLNCYVSGFHPSDIEVDLLKNGERIEKVE HSDLSFSKDWSFYLLYYTEFTPTEKDEYACRVNHVTLSQPKIVKWDRDM (SEQ ID NO:311); and the HILA Class I heavy chain polypeptide comprises the following amino acid sequence:

[0131] GSHSMRYFFTSVSRPGRGEPRFIAVGYVDDTQFVRFDSDAASQRMEPRAPWIEQE GPEYWDGETRKVKAHSQTHRVDL(aa1){C}(aa2)AGSHTVQRMYGCDVGSDWRFLRGYHQYAY DGKDYIALKEDLRSW(aa3)(C)(aa4))HKWEAAHVAEQLRAYLEGTCVEWLRRYLENGKETLQR TDAPKTHMTHHAVSDHEATLRCWALSFYPAEITLTWQRDGEDQTQDTEL(aa5)(C)(aa6)QKWAA VVVPSGQEQRYTCHVQHEGLPKPLTLRWEP (SEQ ID NO:309), where the cysteine residues indicated as {C} form an disulfide bond between the α1 and α2-1 helices and the (C) residue forms a disulfide bond with the β2M polypeptide cysteine at position 12. In the sequence above, “aa1” is “amino acid cluster 1”; “aa2” is “amino acid cluster 2”; “aa3” is “amino acid cluster 3”; “aa4” is “amino acid cluster 4”; “aa5” is “amino acid cluster 5”; and “aa6” is “amino acid cluster 6”; see, e.g., FIG. 10. Each occurrence of aa1, aa2, aa3, aa4, aa5, and aa6 is and independently selected to be 1-5 amino acid residues, wherein the amino acid residues are i) selected independently from any naturally occurring (e.g., encoded) amino acid or ii) any naturally occurring amino acid except proline or glycine.

[0132] In some cases, an MHC polypeptide comprises a single amino acid substitution relative to a reference MHC polypeptide (where a reference MHC polypeptide can be a wild-type MHC polypeptide), where the single amino acid substitution substitutes an amino acid with a cysteine (Cys) residue. Such cysteine residues, when present in an MHC polypeptide of a first polypeptide of a TMMP of the present disclosure, can form a disulfide bond with a cysteine residue present in a second polypeptide chain of a TMMP of the present disclosure.

[0133] In some cases, a first MHC polypeptide in a first polypeptide of a TMMP of the present disclosure, and/or the second MHC polypeptide in the second polypeptide of a TMMP of the present disclosure, includes an amino acid substitution to substitute an amino acid with a cysteine, where the substituted cysteine in the first MHC polypeptide forms a disulfide bond with a cysteine in the second MHC polypeptide, where a cysteine in the first MHC polypeptide forms a disulfide bond with the substituted cysteine in the second MHC polypeptide, or where the substituted cysteine in the first MHC polypeptide forms a disulfide bond with the substituted cysteine in the second MHC polypeptide.

[0134] For example, in some cases, one of following pairs of residues in an HLA β2-microglobulin and an HLA Class I heavy chain is substituted with cysteines (where residue numbers are those of the mature polypeptide): 1) β2M residue 12, HLA Class I heavy chain residue 236: 2) β2M residue 12, HLA Class I heavy chain residue 237; 3) β2M residue 8, HLA Class I heavy chain residue 234; 4) β2M residue 10, HLA Class I heavy chain residue 235; 5) β2M residue 24, HLA Class I heavy chain residue 236; 6) β2M residue 28. HLA Class I heavy chain residue 232; 7) β2M residue 98, HLA Class I heavy chain residue 192; 8) β2M residue 99, HLA Class I heavy chain residue 234; 9) β2M residue 3, HLA Class I heavy chain residue 120; 10) β2M residue 31. HLA Class I heavy chain residue 96; 11) β2M residue 53, HLA Class I heavy chain residue 35; 12) β2M residue 60, HLA Class I heavy chain residue 96; 13) β2M residue 60, HLA Class I heavy chain residue 122; 14) β2M residue 63, HLA Class I heavy chain residue 27; 15) β2M residue Arg3, HLA Class I heavy chain residue Gly120; 16) β2M residue His31, HLA Class I heavy chain residue Gln96; 17) β2M residue Asp53, HLA Class I heavy chain residue Arg35; 18) β2M residue Trp60, HLA Class I heavy chain residue Gln96; 19) β2M residue Trp60, HLA Class I heavy chain residue Asp122; 20) β2M residue Tyr63, HLA Class I heavy chain residue Tyr27; 21) β2M residue Lys6, HLA Class I heavy chain residue Glu232; 22) β2M residue Gln8, HLA Class I heavy chain residue Arg234; 23) β2M residue Tyr10, HLA Class I heavy chain residue Pro235; 24) β2M residue Ser1, HLA Class I heavy chain residue Gln242; 25) β2M residue Asn24, HLA Class I heavy chain residue Ala236; 26) β2M residue Ser28, HLA Class I heavy chain residue Glu232; 27) β2M residue Asp98, HLA Class I heavy chain residue His192; and 28) β2M residue Met99, HLA Class I heavy chain residue Arg234. The amino acid numbering of the MHC/HLA Class I heavy chain is in reference to the mature MHC/HILA Class I heavy chain, without a signal peptide. For example, in some cases, residue 236 of the mature HLA-A amino acid sequence is substituted with a Cys. In some cases, residue 236 of the mature HLA-13 amino acid sequence is substituted with a Cys. In some cases, residue 236 of the mature HLA-C amino acid sequence is substituted with a Cys. In some cases, residue 32 (corresponding to Arg-12 of mature β2M) of an amino acid sequence depicted in FIG. 6 is substituted with a Cys.

[0135] In some cases, a β2M polypeptide comprises the amino acid sequence: IQRTPKIQVY SRHPAENGKS NFLNCYVSGF HPSDIEVDLLKNGERIEKVE HSDLSFSKDW SFYLLYYTEF TPTEKDEYAC RVNHVTLSQP KIVKWDRDM (SEQ ID NO:310). In some cases, a β2M polypeptide comprises the amino acid sequence: IQRTPKIQVY SCHPAENGKS NFLNCYVSGF HPSDIEVDLLKNGERIEKVE HSDLSFSKDW SFYLLYYTEF TPTEKDEYAC RVNHVTLSQP KIVKWDRDM (SEQ ID NO:311).

[0136] In some cases, an HLA Class I heavy chain polypeptide comprises the amino acid sequence:

(SEQ ID NO: 297)
[sequence omitted]

[0137] In some cases, an HLA Class I heavy chain polypeptide comprises the amino acid sequence:

(SEQ ID NO: 312)
GSHSMRYFFTSVSRPGRGEPRFIAVGYVDDTQFVRFDSDAASQRMEPRAP
WIEQEGPEYWDGETRKVKAHSQTHRVDLGTLRGYYNQSEAGSHTVQRMYG
CDVGSDWRFLRGYHQYAYDGKDYIALKEDLRSWTAADMAAQTTKHKWEAA
HVAEQLRAYLEGTCVEWLRRYLENGKETLQRTDAPKTHMTHHAVSDHEAT
LRCWALSFYPAEITLTWQRDGEDQTQDTELVETRPCGDGTFQKWAAVVVP
SGQEQRYTCHVQHEGLPKPLTLRWEP.

[0138] In some cases, an HLA Class I heavy chain polypeptide comprises the amino acid sequence:

(SEQ ID NO: 313)
GSHSMRYFFTSVSRPGRGEPRFIAVGYVDDTQFVRFDSDAASQRMEPRAP
WIEQEGPEYWDGETRKVKAHSQTHRVDLGTLRGAYNQSEAGSHTVQRMYG
CDVGSDWRFLRGYHQYAYDGKDYIALKEDLRSWTAADMAAQTTKHKWEAA
HVAEQLRAYLEGTCVEWLRRYLENGKETLQRTDAPKTHMTHHAVSDHEAT
LRCWALSFYPAEITLTWQRDGEDQTQDTELVETRPCGDGTFQKWAAVVVP
SGQEQRYTCHVQHEGLPKPLTERWE.

[0139] In some cases, the β2M polypeptide comprises the following amino acid sequence:

[0140] IQRTPKIQVY SCHPAENGKS NFLNCYVSGF HPSDIEVDLLKNGERIEKVE HSDLSFSKDW SFYLLYYTEF TPTEKDEYAC RVNHVTLSQP KIVKWDRDM (SEQ ID NO:311); and the HLA Class I heavy chain polypeptide of a TMMP of the present disclosure comprises the following amino acid sequence:

[0141] GSHSMRYFFTSVSRPGRGEPRFIAVGYVDDTQFVRFDSDAASQRMEPRAPWIEQE GPEYWDGETRKVKAHSQTHRVDLGTLRGYYNQSEAGSHTVQRMYGCDVGSDWRFLRGYHQY AYDGKDYIALKEDLRSWTAADMAAQTTKHKWEAAHVAEQLRAYLEGTCVEWLRRYLENGKE TLQRTDAPKTHMTHIIAVSDHEATLRCWALSFYPAEITLTWQRDGEDQTQDTELVETRPCGDGT FQKWAAVVVPSGQEQRYTCHVQHEGLPKPLTLRWEP (SEQ ID NO:312), where the Cys residues that are underlined and in hold form a disulfide bond with one another in the TMMP.

[0142] In some cases, the β2M polypeptide comprises the amino acid sequence: IQRTPKIQVYSCHPAENGKSNFLNCYVSGFHPSDIEVDLLKNGERIEKVEIHSDLSFSKDWSFYLL YYTEFTPTEKDEYACRVNHVTLSQPKIVKWDRDM (SEQ ID NO:314).

[0143] In some cases, the first polypeptide and the second polypeptide of a TMMP of the present disclosure are disulfide linked to one another through: i) a Cys residue present in a linker connecting the peptide epitope and a β2M polypeptide in the first polypeptide chain; and ii) a Cys residue present in an MHC Class I heavy chain in the second polypeptide chain. In some cases, the Cys residue present in the MHC Class I heavy chain is a Cys introduce as a Y84C substitution. In some cases, the linker connecting the peptide epitope and the β2M polypeptide in the first polypeptide chain is GCGGS(G4S)n (SEQ ID NO:315), where n is 1, 2, 3, 4, 5, 6, 7, 8, or 9. For example, in some cases, the linker comprises the amino acid sequence GCGGSGGGGSGGGGSGGGGS (SEQ ID NO:316). As another example, the linker comprises the amino acid sequence GCGGSGGGGSGGGGS (SEQ ID NO:317). Examples of disulfide-linked first and second polypeptides of a TMMP of the present disclosure are depicted schematically in FIG. 2A-2F.

### Multiple Disulfide Bonded TMMPs

[0144] In some cases, the first polypeptide and the second polypeptide of a TMMP of the present disclosure are linked to one another by at least two disulfide bonds (i.e., two interchain disulfide bonds). Examples of such multiple disulfide-linked TMMP are depicted schematically in FIGS. 17A and 17B and FIG. 18A-18C. In addition, where a TMMP of the present disclosure comprises an IgFc polypeptide, a heterodimeric TMMP can be dimerized, such that disulfide bonds link the IgFc polypeptides in the two heterodimeric TMMPs. Such an arrangement is depicted schematically in FIGS. 17C and 17D, where disulfide bonds are represented by dashed lines. Unless otherwise stated, the at least two disulfide bonds described in the multiple disulfide-linked TMMPPs in this section are not referring to disulfide bonds linking IgFc polypeptides in dimerized TMMPs.

[0145] As noted above, in some cases, the first polypeptide and the second polypeptide of a TMMP of the present disclosure are linked to one another by at least two disulfide bonds (i.e., two interchain disulfide bonds). For example, in some instances, the first polypeptide and the second polypeptide of a TMMP of the present disclosure are linked to one another by 2 interchain disulfide bonds. As another example, in some instances, the first polypeptide and the second polypeptide of a TMMP of the present disclosure are linked to one another by 3 interchain disulfide bonds. As another example, in some instances, the first polypeptide and the second polypeptide of a TMMP of the present disclosure are linked to one another by 4 interchain disulfide bonds.

[0146] In some cases where a peptide epitope in a first polypeptide of a TMMP of the present disclosure is linked to a β2M polypeptide by a linker comprising a Cys, at least one of the at least two disulfide bonds links a Cys in the linker to a Cys in an MHC Class I heavy chain in the second polypeptide. In some cases, where a peptide epitope in a first polypeptide of a TMMP of the present disclosure is linked to an MHC Class I heavy chain polypeptide by a linker, at least one of the at least two disulfide bonds links a Cys in the linker to a Cys in a β2M polypeptide present in the second polypeptide.

[0147] In some cases, a multiple disulfide-linked TMMP of the present disclosure (e.g., a double disulfide-linked TMMP) exhibits increased stability, compared to a control TMMP that includes only one of the at least two disulfide bonds. In some cases, a multiple disulfide-linked TMMP (e.g., a double disulfide-linked TMMP) of the present disclosure exhibits increased in vitro stability, compared to a control TMMP that includes only one of the at least two disulfide bonds. For example, in some cases, a multiple disulfide-linked TMMP of the present disclosure (e.g., a double disulfide-linked TMMP) exhibits at least 5%, at least 10%, at least 15%, at least 20%, at least 25%, at least 50%, at least 2-fold, at least 5-fold, or at least 10-fold, greater in vitro stability, compared to a control TMMP that includes only one of the at least two disulfide bonds.

[0148] Whether a multiple disulfide-linked TMMP of the present disclosure (e.g., a double disulfide-linked TMMP) exhibits increased in vitro stability, compared to a control TMMP that includes only one of the at least two disulfide bonds, can be determined by measuring the amount disulfide-linked heterodimeric TMMP present in a sample over time and/or under a specified condition and/or during purification of the TMMP.

[0149] For example, in some cases, a multiple disulfide-linked TMMP (e.g., a double disulfide-linked TMMP) of the present disclosure exhibits at least 5%, at least 10%, at least 15%, at least 20%, at least 25%, at least 50%, at least 2-fold, at least 5-fold, or at least 10-fold, greater in vitro stability, compared to a control TMMP that includes only one of the at least two disulfide bonds, when the TMMP is stored at 37° C. for a period of time (e.g., for a period of time of from about 1 week to about 2 weeks, from about 2 weeks to about 4 weeks, or from about 4 weeks to about 2 months). For example, in some cases, the amount of disulfide-linked heterodimeric TMMP remaining after storing a multiple disulfide-linked TMMP (e.g., a double disulfide-linked TMMP) of the present disclosure in vitro at 37° C. for 28 days is at least at least 5%, at least 10%, at least 15%, at least 20%, at least 25%, at least 50%, at least 2-fold, at least 5-fold, or at least 10-fold, greater than the amount of disulfide-linked heterodimeric TMMP remaining after storing a control TMMP (a TMMP that includes only one of the at least two disulfide bonds present in the multiple disulfide-linked TMMP) in vitro at 37° C. for 28 days.

[0150] As an example, a double disulfide-linked TMMP comprising polypeptides 1715 and 2380, as depicted in FIGS. 14A and 148, exhibits greater in vitro stability, compared to a TMMP comprising polypeptides 2405 and 2380, where polypeptide 2405 is depicted in FIG. 14D, where such TMMP comprises only one disulfide linkage, where the single disulfide linkage is formed between: i) the Cys of the G2C linker between the epitope and the β2M; and ii) the Cys provided by a Y84C substitution in the MHC Class I heavy chain. As another example, a double disulfide-linked TMMP comprising polypeptides 1715 and 2380, as depicted in FIGS. 14A and 14B, exhibits greater in vitro stability, compared to a TMMP comprising polypeptides 1380 and 2380, where polypeptide 1380 is depicted in FIG. 14E, where such TMMP comprises only one disulfide linkage, where the single disulfide linkage is formed between: i) the Cys provided by an R12C substitution in the β2M polypeptide; and ii) the Cys provided by the A236C substitution in the M-C Class I heavy chain.

[0151] In some cases, a multiple disulfide-linked TMMP of the present disclosure exhibits increased in vivo stability, compared to a control TMMP that includes only one of the at least two disulfide bonds. For example, in some cases, a multiple disulfide-linked TMMP of the present disclosure exhibits at least 5%, at least 10%, at least 15%, at least 20%, at least 25%, at least 50%, at least 2-fold, at least 5-fold, or at least 10-fold, greater in vivo stability, compared to a control TMMP that includes only one of the at least two disulfide bonds.

[0152] In some cases, the presence of two disulfide bonds in a multiple disulfide-linked TMMP of the present disclosure (e.g., a double disulfide-linked TMMP) provides for increased production of disulfide-linked heterodimeric TMMP, compared to the amount of disulfide-linked heterodimeric TMMP produced when the TMMP is a control TMMP that includes only one of the at least two disulfide bonds. For example, a multiple disulfide-linked TMMP of the present disclosure (e.g., a double disulfide-linked TMMP) can be produced in a mammalian cell in in vitro cell culture, where the mammalian cell is cultured in a liquid cell culture medium. The TMMP can be secreted into the cell culture medium. The cells can be lysed, generating a cell lysate, and the TMMP can be present in the cell lysate. The TMMP can be purified from the cell culture medium and/or the cell lysate. For example, where the TMMP comprises an IgG1 Fc polypeptide, the cell culture medium and/or the cell lysate can be contacted with immobilized protein A (e.g., the cell culture medium and/or the cell lysate can be applied to a protein A column, where protein A is immobilized onto beads). TMMP present in the cell culture medium and/or the cell lysate becomes bound to the immobilized protein A. After washing the column to remove unbound materials, the bound TMMP is eluted, generating a protein A eluate. The amount of disulfide-linked heterodimeric TMMP present in the protein A eluate is a least 0.5%, at least 1%, at least 2%, at least 3%, at least 4%, at least 5%, at least 6%, at least 7%, at least 8%, at least 9%, or at least 10%, higher than the amount of disulfide-linked heterodimeric TMMP present in the protein A eluate when the TMMP is a control TMMP that includes only one of the at least two disulfide bonds present in the multiple disulfide-linked TMMP (e.g., a double disulfide-linked TMMP). In some cases, the percent of the total TMMP protein in the eluate that is non-aggregated disulfide-linked heterodimeric TMMP is at least 70%, at least 75%, at least 80%, at least 85%, at least 90%, at least 95%, or at least 99%. The protein A eluate can be subjected to size exclusion chromatography (SEC) and/or one or more other additional purification steps.

[0153] In some cases, a T-cell modulatory multimeric polypeptide of the present disclosure comprises at least one heterodimer comprising: a) a first polypeptide comprising: i) a WT1 peptide epitope, where the WT1 peptide has a length of at least 4 amino acids (e.g., from 4 amino acids to 25 amino acids; e.g., the WT1 peptide has a length of 4, 5, 6, 7, 8, 9, 10-15, 15-20, or 20-25 amino acids); and ii) first MHC polypeptide; b) a second polypeptide comprising a second MHC polypeptide, and c) at least one immunomodulatory polypeptide, where the first and/or the second polypeptide comprises the immunomodulatory polypeptide, and where the heterodimer comprises 2 disulfide bonds between the first polypeptide and the second polypeptide (i.e., the heterodimer comprises: i) a first disulfide bond linking the first polypeptide and the second polypeptide; and ii) a second disulfide bond linking the first polypeptide and the second polypeptide). Expressed another way, the first polypeptide comprises a first Cys residue that forms a disulfide bond (a first disulfide bond) with a first Cys residue in the second polypeptide; and the first polypeptide comprises a second Cys residue that forms a disulfide bond (a second disulfide bond) with a second Cys residue in the second polypeptide.

[0154] In some cases, a TMMP of the present disclosure comprises: a) a first polypeptide comprising, in order from N-terminus to C-terminus: i) a peptide epitope; ii) a peptide linker; and iii) a β2M polypeptide; and b) a second polypeptide comprising an MHC Class I heavy chain polypeptide, where one or both of the first and the second polypeptides comprises at least one immunomodulatory polypeptide, where the TMMP comprises: a) a first disulfide linkage between: i) a Cys present in the linker between the peptide epitope and the β2M polypeptide; and ii) a first Cys introduced into the MHC Class I heavy chain polypeptide; and b) at least a second disulfide linkage between the first polypeptide and the second polypeptide, where the at least a second disulfide linkage is between: i) a Cys in the first polypeptide that is C-terminal to the Cys present in the linker; and ii) a Cys in the second polypeptide that is C-terminal to the first Cys introduced into the MHC Class I heavy chain polypeptide.

[0155] In some cases, a first and a second disulfide bond-forming Cys residues in a first or a second polypeptide of a TMMP of the present disclosure are from about 10 amino acids to about 200 amino acids apart from one another. For example, in some cases, a first and a second disulfide bond-forming Cys residues in a first or a second polypeptide of a TMMP are from about 10 amino acids (aa) to about 15 aa, from about 15 aa to about 20 aa, from about 20 an to about 25 aa, from about 25 an to about 30 aa, from about 30 aa to about 40 aa, from about 40 aa to about 50 aa, from about 50 aa to about 60 aa, from about 60 aa to about 70 aa, from about 70 aa to about 80 aa, from about 80 aa to about 90 aa, from about 90 aa to about 100 aa, from about 100 an to about 110 aa, from about 110 aa to about 120 aa, from about 120 aa to about 130 aa, from about 130 aa to about 140 aa, from about 140 aa to about 150 aa, from about 150 aa to about 160 aa, from about 160 aa to about 170 aa, from about 170 aa to about 180 aa, from about 180 aa to about 190 aa, or from about 190 aa to about 200 aa.

[0156] As an example, in some cases, the first and second disulfide bond-forming Cys residues in the first polypeptide of a TMMP of the present disclosure are from about 10 amino acids to about 80 amino acid residues apart from one another. For example, in some cases, the second disulfide bond-forming Cys residue in the first polypeptide is from about 10 amino acids to about 80 amino acids (e.g., from about 10 amino acids (aa) to about 15 aa, from about 15 aa to about 20 aa, from about 20 aa to about 25 aa, from about 25 aa to about 30 aa, from about 30 aa to about 40 aa, from about 40 aa to about 50 aa, from about 50 aa to about 60 aa, from about 60 an to about 70 aa, or from about 70 an to about 80 aa) C-terminal to the first disulfide bond-forming Cys residue in the first polypeptide. In some cases, the second disulfide bond-forming Cys residue in the first polypeptide is 10 aa, 11 aa, 12 aa, 13 aa, 14 aa, 15 aa, 16 aa, 17 aa, 18 aa, 19 aa, 20 aa, 21 aa, 22 aa, 23 aa, 24 aa, or 25 aa, C-terminal to the first disulfide bond-forming Cys residue in the first polypeptide. In some cases, the second disulfide bond-forming Cys residue in the first polypeptide is 15 an C-terminal to the first disulfide bond-forming Cys residue in the first polypeptide. In some cases, the second disulfide bond-forming Cys residue in the first polypeptide is 20 aa C-terminal to the first disulfide bond-forming Cys residue in the first polypeptide. In some cases, the second disulfide bond-forming Cys residue in the first polypeptide is 25 aa C-terminal to the first disulfide bond-forming Cys residue in the first polypeptide.

[0157] In some cases, the first and second disulfide bond-forming Cys residues in the second polypeptide of a TMMP of the present disclosure are from about 140 amino acids to about 160 amino acids apart from one another. For example, in some cases, the second disulfide bond-forming Cys residue in the second polypeptide is from about 140 amino acids to about 160 amino acids C-terminal to the first disulfide bond-forming Cys residue in the second polypeptide. In some cases, the second disulfide bond-forming Cys residue in the second polypeptide is 140 amino acids (aa), 141 aa, 142 aa, 143 aa, 144 aa, 145 aa, 146 aa, 147 aa, 148 aa, 149 aa, 150 aa, 151 aa, 152 aa, 153 aa, 154 aa, 155 aa, 156 aa, 157 aa, 158 aa, 159 aa, or 160 aa, C-terminal to the first disulfide bond-forming Cys residue in the second polypeptide.

[0158] A multiple disulfide-linked TMMP of the present disclosure (e.g., a double disulfide-linked TMMP) can comprise: a) a first polypeptide comprising: i) a WT1 peptide (e.g., a WT1 peptide of from 4 amino acids to about 25 amino acids); and ii) a first MHC polypeptide, where the first polypeptide comprises a peptide linker between the WT1 peptide and the first MHC polypeptide, where the peptide linker comprises a Cys residue, and where the first MHC polypeptide is a β2M polypeptide that comprises an amino acid substitution that introduces a Cys residue; b) and a second polypeptide comprising a second MHC polypeptide, where the second MHC polypeptide is a Class I heavy chain comprising a Y84C substitution and an A236C substitution, based on the amino acid numbering of HLA-A*0201 (depicted in FIG. 9A), or at corresponding positions in another Class I heavy chain allele, where the TMMP comprises a disulfide bond between the Cys residue in the peptide linker and the Cys residue at amino acid position 84 of the Class I heavy chain or corresponding position of another Class I heavy chain allele, and where the TMMP comprises a disulfide bond between the introduced Cys residue in the β2M polypeptide and the Cys at amino acid position 236 of the Class I heavy chain or corresponding position of another Class I heavy chain allele; and c) at least one immunomodulatory polypeptide, where the first and/or the second polypeptide comprises the at least one immunomodulatory polypeptide. Examples are depicted schematically in FIG. 17A and FIG. 17B.

[0159] In some cases, the peptide linker comprises the amino acid sequence GCGGS (SEQ ID NO:318). In some cases, the peptide linker comprises the amino acid sequence GCGGS(GGGGS)n (SEQ ID NO:319), where n is an integer from 1 to 10. In some cases, the peptide linker comprises the amino acid sequence GCGGS(GGGGS)n (SEQ ID NO:398), where n is 1. In some cases, the peptide linker comprises the amino acid sequence GCGGS(GGGGS)n (SEQ ID NO:320), where n is 2. In some cases, the peptide linker comprises the amino acid sequence GCGGS(GGGGS)n (SEQ ID NO:321), where n is 3. In some cases, the peptide linker comprises the amino acid sequence GCGGS(GGGGS)n (SEQ ID NO:322), where n is 4. In some cases, the peptide linker comprises the amino acid sequence GCGGS(GGGGS)n (SEQ ID NO:323), where n is 5. In some cases, the peptide linker comprises the amino acid sequence GCGGS(GGGGS)n (SEQ ID NO:324), where n is 6. In some cases, the peptide linker comprises the amino acid sequence GCGGS(GGGGS)n (SEQ ID NO:325), where n is 7. In some cases, the peptide linker comprises the amino acid sequence GCGGS(GGGGS)n (SEQ ID NO:326), where n is 8. In some cases, the peptide linker comprises the amino acid sequence GCGGS(GGGGS)n (SEQ ID NO: 327), where n is 9. In some cases, the peptide linker comprises the amino acid sequence GCGGS(GGGGS)n (SEQ ID NO:328), where n is 10.

[0160] In some cases, the peptide linker comprises the amino acid sequence CGGGS (SEQ ID NO:329). In some cases, the peptide linker comprises the amino acid sequence CGGGS(GGGGS)n (SEQ ID NO: 330), where n is an integer from 1 to 10. In some cases, the peptide linker comprises the amino acid sequence CGGGS(GGGGS)n (SEQ ID NO:331), where n is 1. In some cases, the peptide linker comprises the amino acid sequence CGGGS(GGGGS)n (SEQ ID NO:332), where n is 2. In some cases, the peptide linker comprises the amino acid sequence CGGGS(GGGGS)n (SEQ ID NO:333), where n is 3. In some cases, the peptide linker comprises the amino acid sequence CGGGS(GGGGS)n (SEQ ID NO:334), where n is 4. In some cases, the peptide linker comprises the amino acid sequence CGGGS(GGGGS)n (SEQ ID NO:335), where n is 5. In some cases, the peptide linker comprises the amino acid sequence CGGGS(GGGGS)n (SEQ ID NO:336), where n is 6. In some cases, the peptide linker comprises the amino acid sequence CGGGS(GGGGS)n (SEQ ID NO:337), where n is 7. In some cases, the peptide linker comprises the amino acid sequence CGGGS(GGGGS)n (SEQ ID NO:338), where n is 8. In some cases, the peptide linker comprises the amino acid sequence CGGGS(GGGGS)n (SEQ ID NO:339), where n is 9. In some cases, the peptide linker comprises the amino acid sequence CGGGS(GGGGS)n (SEQ ID NO:340), where n is 10.

[0161] The following are non-limiting examples of MHC Class I heavy chain comprising a Y84C substitution and an A236C substitution, based on the amino acid numbering of HLA-A*0201 (depicted in FIG. 9A), or at corresponding positions in another Class I heavy chain allele.

### HLA-A

[0162] In some cases, a multiple disulfide-linked TMMP of the present disclosure (e.g. a double disulfide-linked TMMP) comprises: a) a first polypeptide comprising: i) a WT1 peptide (e.g., a WT1 peptide of from 4 amino acids to about 25 amino acids); and ii) a first MHC polypeptide, where the first polypeptide comprises a peptide linker between the WT1 peptide and the first MHC polypeptide, where the peptide linker comprises a Cys residue, and where the first MHC polypeptide is a β2M polypeptide that comprises an amino acid substitution that introduces a Cys residue; and b) a second polypeptide comprising an HLA-A MHC Class I heavy chain comprising an amino acid sequence having at least 60%, at least 70%, at least 80%, at least 90%, at least 95%, at least 98%, at least 99%, or 100%, amino acid sequence identity to the following amino acid sequence: GSHSMRYFFTSVSRPGRGEPRFIAVGYVDDTQFVRFDSDAASQRMEPRAPWIEQEGPEYWDGET RKVKAIHSQTHRVDLGTLRGCYNQSEAGSHTVQRMYGCDVGSDWRFLRGYHQYAYDGKDYIA LKEDLRSWTAADMAAQTTKHKWEAAHVAEQLRAYLEGTCVEWLRRYLENGKETLQRTDAPK THMTHHAVSDHEATLRCWALSFYPAEITLTWQRDGEDQTQDTELVETRPCGDGTFQKWAAVV VPSGQEQRYTCHVQHEGLPKPLTLRWEP (SEQ ID NO:341), where amino acid 84 is a Cys and amino acid 236 is a Cys; and c) at least one immunomodulatory polypeptide, where the first and/or the second polypeptide comprises the at least one immunomodulatory polypeptide. In some cases, the peptide linker comprises the amino acid sequence GCGGS (SEQ ID NO:318). In some cases, the peptide linker comprises the amino acid sequence GCGGS(GGGGS)n (SEQ ID NO:319), where n is an integer from 1 to 10. In some cases, the β2M polypeptide comprises an R12C substitution. For example, the 112M polypeptide can comprises an amino acid sequence having at least 90%, at least 95%, at least 98%, at least 99%, or 100%, amino acid sequence identity to the following amino acid sequence: IQRTPKIQVYSCHPAENGKSNFLNCYVSGFHPSDIEVDLLKNGERIEKVEHSDLSFSKDWSFYLL YYTEFTPTEKDEYACRVNHVTLSQPKIVKWDRDM (SEQ ID NO:314), where amino acid 12 is a Cys. The at least one immunomodulatory polypeptide can be a polypeptide that exerts an activating/stimulating effect on the target T cell or a suppressing/inhibitory effect on the target T cell. For example, the at least one immunomodulatory polypeptide can be a cytokine (e.g., an IL2 polypeptide, an IL7 polypeptide, an IL12 polypeptide, an IL15 polypeptide, an IL17 polypeptide, an IL21 polypeptide, an IL27 polypeptide, an IL-23 polypeptide, a TGFβ polypeptide, and the like; and including all family members, e.g., IL17A, IL-17B, IL-17C, IL-17D, IL-17E, IL-17F, IL-17E), a 4-1BBL polypeptide, an ICOS-L polypeptide, an OX-40L polypeptide, a CD80 polypeptide, a CD86 polypeptide, (CD80 and CD86 are also known as B7-1 and B7-2, respectively), a CD40 polypeptide, a CD70 polypeptide, a JAG1 (CD339) polypeptide, an ICAM (CD540 polypeptide, a PD-L1 polypeptide, a FasL polypeptide, a PD-L2 polypeptide, a PD-1H (VISTA) polypeptide, an ICOS-L (CD275) polypeptide, a GITRL polypeptide, an HVEM polypeptide, a CXCL10 polypeptide, a CXCL9 polypeptide, a CXCL11 polypeptide, a CXCL13 polypeptide, and a CX3CL1 polypeptide, a Galectin-9 polypeptide, a CD83 polypeptide, a CD30L polypeptide, a HLA-G polypeptide, a MICA polypeptide, a MICB polypeptide, a HVEM (CD270) polypeptide, a lymphotoxin beta receptor polypeptide, a 3/TR6 polypeptide, an ILT3 polypeptide, an ILT4 polypeptide, a CXCL10 polypeptide, a CXCL9 polypeptide, a CXCL11 polypeptide, a CXCL13 polypeptide, or a CX3CL1 polypeptide. These immunomodulatory polypeptides may be the wild type polypeptide or a variant of a wild type polypeptide. In some cases, the immunomodulatory polypeptide is an activating (“stimulatory”) immunomodulatory polypeptide; e.g., the immunomodulatory polypeptide may produce an activating/stimulating effect on a T cell. Examples of activating immunomodulatory polypeptides include, e.g., CD80, CD86, 4-1BBL, OX40L, CD70, ICOS-L, CD40, ICAM (CD54), IL2, IL7, 1L12, IL15, IL17, IL21, IL27, IL23, GITRL, TGFβ, and lymphotoxin beta receptor. In some cases, the immunomodulatory polypeptide is an inhibitory (“suppressing”) immunomodulatory polypeptide; e.g., the immunomodulatory polypeptide s may produce a suppressing/inhibitory effect on a T cell. Examples of inhibitory immunomodulatory polypeptides include, e.g., PD-1H, PD-L1, PD-L2, TGFβ, FasL, HVEM, Galectin-9, ILT3, and ILT4. TGFβ polypeptides may produce either an activating/stimulating effect or a suppressing/inhibitory effect, depending on the context.

[0163] In some cases, the at least one immunomodulatory polypeptide is a reduced affinity variant, as described elsewhere herein. In some cases, the first or the second polypeptide comprises an Ig Fe polypeptide.

[0164] In some cases, a multiple disulfide-linked TMMP of the present disclosure (e.g., a double disulfide-linked TMMP) comprises an HLA-A Class I heavy chain polypeptide. In some cases, the HLA-A heavy chain polypeptide present in a multiple disulfide-linked TMMP of the present disclosure (e.g., a double disulfide-linked TMMP) comprises an amino acid sequence having at least 95%, at least 98%, or at least 99%, amino acid sequence identity to the HLA-A*0101, HLA-A*0201, HLA-A*0202, HLA-A*1101, HLA-A*2301, HLA-A*2402, HLA-A*2407, HLA-A*3303, or HLA-A*3401 amino acid sequence depicted in FIG. 9A, where the HLA-A heavy chain polypeptide comprises Y84C and A236C substitutions.

### HLA-A*0101 (Y84C; A236C)

[0165] In some cases, the HLA-A heavy chain polypeptide present in a multiple disulfide-linked TMMP of the present disclosure (e.g., a double disulfide-linked TMMP) comprises an amino acid sequence having at least 95%, at least 98%, at least 99%, or 100%, amino acid sequence identity to the following HLA-A*0101 (Y84C; A236C) amino acid sequence:

[0166] GSHSMRYFFTSVSRPGRGEPRFIAVGYVDDTQFVRFDSDAASQKMEPRAPWIEQE GPEYWDQETRNMKAHSQTDRANLGTIRGCYNQSEDGSHTIQIMYGCDVGPDGRFLRGYRQDA YDGKDYIALNEDLRSWTAADMAAQITKRKWEAVHAAEQRRVYLEGRCVDGLRRYLENGKET LQRTDPPKTHMTHHPISDHEATLRCWALGFYPAEITLTWQRDGEDQTQDTELVETRPCGDGTF QKWAAVVVPSGEEQRYTCHVQHEGLPKPLTLRWE (SEQ ID NO:343), where amino acid 84 is a Cys and amino acid 236 is a Cys.

### HLA-A*0201 (Y84C; A236C)

[0167] In some cases, the HLA-A heavy chain polypeptide present in a multiple disulfide-linked TMMP of the present disclosure (e.g., a double disulfide-linked TMMP) comprises an amino acid sequence having at least 95%, at least 98%, at least 99%, or 100%, amino acid sequence identity to the following HLA-A*0201 (Y84C; A236C) amino acid sequence: GSHSMRYFFTSVSRPGRGEPRFIAVGYVDDTQFVRFDSDAASQRMEPRAPWIEQEGPEYWDGET RKVKAHSQTHRVDILGTLRGCYNQSEAGSHTVQRMYGCDVGSDWRFIRGYHQYAYDGKDYIA LKEDLRSWTAADMAAQTTKHKWEAAHVAEQLRAYLEGTCVEWLRRYLENGKETLQRTDAPK THMTHHAVSDHEATLRCWALSFYPAEITLTWQRDGEDQTQDTELVETRPCGDGTFQKWAAVV VPSGQEQRYTCHVQHEGLPKPLTLRWEP (SEQ ID NO:341), where amino acid 84 is a Cys and amino acid 236 is a Cys.

### HLA-A*0202 (Y84C; A236C)

[0168] In some cases, the HLA-A heavy chain polypeptide present in a multiple disulfide-linked TMMP of the present disclosure (e.g., a double disulfide-linked TMMP) comprises an amino acid sequence having at least 95%, at least 98%, at least 99%, or 100%, amino acid sequence identity to the following HLA-A*0202 (Y84C; A236C) amino acid sequence: GSHSMRYFFTSVSRPGRGEPRFIAVGYVDDTQFVRFDSDAASQRMEPRAPWIEQEGPEYWDGET RKVKAHSQTHRVDLGTLRGCYNQSEAGSHTVQRMYGCDVGSDWRFLRGYHQYAYDGKDYIA LKEDLRSWTAADMAAQTTKHKWEAAHVAEQLRAYLEGTCVEWLRRYLENGKETLQRTDAPK THMTHHAVSDHEATLRCWALSFYPAEITLTWQRDGEDQTQDTELVETRPCGDGTFQKWAAVV VPSGQEQRYTCHVQHEGLPKPLTLRWE (SEQ ID NO:341), where amino acid 84 is a Cys and amino acid 236 is a Cys.

### HLA-A*1101 (Y84C; A236C)

[0169] In some cases, the HLA-A heavy chain polypeptide present in a multiple disulfide-linked TMMP of the present disclosure (e.g., a double disulfide-linked TMMP) comprises an amino acid sequence having at least 95%, at least 98%, at least 99%, or 100%, amino acid sequence identity to the following HLA-A*1101 (Y84C; A236C) amino acid sequence: GSHSMRYFYTSVSRPGRGEPRFIAVGYVDDTQFVRFDSDAASQRMEPRAPWIEQEGPEYWDQE TRNVKAQSQTDRVDLGTLRGCYNQSEDGSHTIQIMYGCDVGPDGRFLRGYRQDAYDGKDYIA LNEDLRSWTAADMAAQITKRKWEAAHAAEQQRAYLEGRCVEWLRRYLENGKETLQRTDPPK THMTHHPISDHEATIRCWAIGFYPAFITITWQRDGEDQTQDTEIVETRPCGDGTFQKWAAVV VPSGEEQRYTCHVQHEGLPKPLTLRWE (SEQ ID NO:344), where amino acid 84 is a Cys and amino acid 236 is a Cys.

### HLA-A*2301 (Y84C; A236C)

[0170] In some cases, the HLA-A heavy chain polypeptide present in a multiple disulfide-linked TMMP of the present disclosure (e.g., a double disulfide-linked TMMP) comprises an amino acid sequence having at least 95%, at least 98%, at least 99%, or 100%, amino acid sequence identity to the following HLA-A*2301 (Y84C; A236C) amino acid sequence: GSHSMRYFSTSVSRPGRGEPRFIAVGYVDDTQFVRFDSDAASQRMEPRAPWIEQEGPEYWDEET GKVKAHSQTDRENIRIAIRCYNQSEAGSHTLQMMFGCDVGSDGRFLRGYHQYAYDGKDYIAL KEDLRSWTAADMAAQITQRKWEAARVAEQLRAYLEGTCVDGLRRYLENGKETLQRTDPPKTH MTHHPISDHEATIRCWALGFYPAEITLTWQRDGEDQTQDTELVETRPCGDGTFQKWAAVVVPS GEEQRYTCHVQHEGLPKPLTLRWE (SEQ ID NO:345), where amino acid 84 is a Cys and amino acid 236 is a Cys.

### HLA-A*2402 (Y84C; A236C)

[0171] In some cases, the HLA-A heavy chain polypeptide present in a multiple disulfide-linked TMMP of the present disclosure (e.g., a double disulfide-linked TMMP) comprises an amino acid sequence having at least 95%, at least 98%, at least 99%, or 100%, amino acid sequence identity to the following HLA-A*2402 (Y84C; A236C) amino acid sequence: GSHSMRYFSTSVSRPGRGEPRFIAVGYVDDTQFVRFDSDAASQRMEPRAPWIEQEGPEYWDEET GKVKAHSQTDRENLRIALRCYNQSEAGSHTLQMMFGCDVGSDGRFLRGYHQYAYDGKDYIAL KEDLRSWTAADMAAQITKRKWEAAHVAEQQRAYLEGTCVDGLRRYLENGKETLQRTDPPKT HMTHHPISDHEATLRCWALGFYPAEITLTWQRDGEDQTQDTELVETRPCGDGTFQKWAAVVV PSGEEQRYTCHVQHEGLPKPLTLRWE (SEQ ID NO:346), where amino acid 84 is a Cys and amino acid 236 is a Cys.

### HLA-A*2407 (Y84C; A236C)

[0172] In some cases, the HLA-A heavy chain polypeptide present in a multiple disulfide-linked TMMP of the present disclosure (e.g., a double disulfide-linked TMMP) comprises an amino acid sequence having at least 95%, at least 98%, at least 99%, or 100%, amino acid sequence identity to the following HLA-A*2407 (Y84C; A236C) amino acid sequence: GSHSMRYFSTSVSRPGRGEPRFIAVGYVDDTQFVRFDSDAASQRMEPRAPWIEQEGPEYWDEET GKVKAQSQTDRENLRIALRCYNQSEAGSHTLQMMFGCDVGSDGRFLRGYHQYAYDGKDYIAL KEDLRSWTAADMAAQITKRKWEAAHVAEQQRAYLEGTCVDGLRRYLENGKETLQRTDPPKT HMTHHPISDHEATLRCWALGFYPAEITLTWQRDGEDQTQDTELVETRPCGDGTFQKWAAVVV PSGEEQRYTCHVQHEGLPKPLTLRWE (SEQ ID NO:347), where amino acid 84 is a Cys and amino acid 236 is a Cys.

### HLA-A*3303 (Y84C; A236C)

[0173] In some cases, the HLA-A heavy chain polypeptide present in a multiple disulfide-linked TMMP of the present disclosure (e.g., a double disulfide-linked TMMP) comprises an amino acid sequence having at least 95%, at least 98%, at least 99%, or 100%, amino acid sequence identity to the following HLA-A*3303 (Y84C; A236C) amino acid sequence:

[0174] GSHSMRYTTSVSRPGRGEPRFIAVGYVDDTQFVRFDSDAASQRMEPRAPWIEQE GPEYWDRNTRNVKAHSQIDRVDLGTLRGCYNQSEAGSHTIQMMYGCDVGSDGRFLRGYQQD AYDGKDYIALNEDLRSWTAADMAAQITQRKWEAARVAEQLRAYLEGTCVEWLRRYLENGKE TIQRTDPPKTHMTHHAVSDHEATLRCWALSFYPAEITLTWQRDGEDQTQDTELVETRPCGDGT FQKWASVVVPSGQEQRYTCHVQHEGLPKPLTLRWE (SEQ ID NO:348), where amino acid 84 is a Cys and amino acid 236 is a Cys.

### HLA-A*3401 (Y84C; A236C)

[0175] In some cases, the HLA-A heavy chain polypeptide present in a multiple disulfide-linked TMMP of the present disclosure (e.g., a double disulfide-linked TMMP) comprises an amino acid sequence having at least 95%, at least 98%, at least 99%, or 100%, amino acid sequence identity to the following HLA-A*3401 (Y84C; A236C) amino acid sequence: GSHSMRYFYTSVSRPGRGEPRFIAVGYVDDTQFVRFDSDAASQRMEPRAPWIEQEGPEYWDRN TRKVKAQSQTDRVDLGTLRGCYNQSEDGSHTIQRMYGCDVGPDGRFLRGYQQDAYDGKDYIA LNEDLRSWTAADMAAQITQRKWETAHEAEQWRAYLEGTCVEWLRRYLENGKETLQRTDAPK THMTHHAVSDHEATLRCWALSFYPAEITLTWQRDGEDQTQDTELVETRPCGDGTFQKWASVV VPSGQEQRYTCHVQHEGLPKPLTLRWE (SEQ ID NO:349), where amino acid 84 is a Cys and amino acid 236 is a Cys.

### HLA-B

[0176] In some cases, a multiple disulfide-linked TMMP of the present disclosure (e.g., a double disulfide-linked TMMP) comprises: a) a first polypeptide comprising: i) a WT1 peptide (e.g., a WT1 peptide of from 4 amino acids to about 25 amino acids); and ii) a first MHC polypeptide, where the first polypeptide comprises a peptide linker between the WT1 peptide and the first MHC polypeptide, where the peptide linker comprises a Cys residue, and where the first MHC polypeptide is a β2M polypeptide that comprises an amino acid substitution that introduces a Cys residue; and b) a second polypeptide comprising an HLA-B MHC Class I heavy chain comprising an amino acid sequence having at least 60%, at least 70%, at least 80%, at least 90%, at least 95%, at least 98%, at least 99%, or 100%, amino acid sequence identity to the following amino acid sequence: GSHSMRYFYTSVSRPGRGEPRFISVGYVDDTQFVRFDSDAASPREEPRAPWIEQEGPEYWDRNT QIYKAQAQTDRESLRNLRGCYNQSEAGSHTLQSMYGCDVGPDGRLLRGHDQYAYDGKDYIAL NEDLRSWTAADTAAQITQRKWEAAREAEQRRAYILFGECVEWILRRYLENGKDKLERADPPKTH VTHHPISDHEATLRCWALGFYPAEFITLTWQRDGEDQTQDTrELVETRPCGDRTFQKWAAVVVPS GEEQRYTCHVQHEGLPKPLTLRWEP (SEQ ID NO:350), where amino acid 84 is a Cys and amino acid 236 is a Cys; and c) at least one immunomodulatory polypeptide, where the first and/or the second polypeptide comprises the at least one immunomodulatory polypeptide. In some cases, the peptide linker comprises the amino acid sequence GCGGS (SEQ ID NO:318). In some cases, the peptide linker comprises the amino acid sequence GCGGS(GGGGS)n (SEQ ID NO:342), where n is an integer from 1 to 10. In some cases, the β2M polypeptide comprises an R12C substitution. For example, the β2M polypeptide can comprises an amino acid sequence having at least 90%, at least 95%, at least 98%, at least 99%, or 100%, amino acid sequence identity to the following amino acid sequence: IQRTPKIQVYSCHPAENGKSNFLNCYVSGFHPSDIEVDLLKNGERIEKVEHSDLSFSKDWSFYLL YYTEFTPTEKDEYACRVNHVTLSQPKIVKWDRDM (SEQ ID NO:314), where amino acid 12 is a Cys. The at least one immunomodulatory polypeptide can be a polypeptide that exerts an activating/stimulating effect on the target T cell or a suppressing/inhibitory effect on the target T cell. For example, the at least one immunomodulatory polypeptide can be a cytokine (e.g., an IL2 polypeptide, an IL7 polypeptide, an IL12 polypeptide, an IL15 polypeptide, an IL17 polypeptide, an IL21 polypeptide, an IL27 polypeptide, an IL-23 polypeptide, a TGFβ polypeptide, and the like; and including all family members, e.g., IL17A, IL-17B, IL-17C, IL-17D, IL-17E, IL-17F, IL-17E), a 4-1BBL polypeptide, an ICOS-L polypeptide, an OX-40L polypeptide, a CD80 polypeptide, a CD86 polypeptide, (CD80 and CD86 are also known as B7-1 and B7-2, respectively), a CD40 polypeptide, a CD70 polypeptide, a JAG1 (CD339) polypeptide, an ICAM (CD540 polypeptide, a PD-L1 polypeptide, a FasL polypeptide, a PD-L2 polypeptide, a PD-1H (VISTA) polypeptide, an ICOS-L (CD275) polypeptide, a GITRL polypeptide, an HVEM polypeptide, a CXCL10 polypeptide, a CXCL9 polypeptide, a CXCL11 polypeptide, a CXCL13 polypeptide, and a CX3CL1 polypeptide, a Galectin-9 polypeptide, a CD83 polypeptide, a CD30L polypeptide, a HLA-G polypeptide, a MICA polypeptide, a MICB polypeptide, a HVEM (CD270) polypeptide, a lymphotoxin beta receptor polypeptide, a 3/TR6 polypeptide, an ILT3 polypeptide, an ILT4 polypeptide, a CXCL10 polypeptide, a CXCL9 polypeptide, a CXCL11 polypeptide, a CXCL13 polypeptide, or a CX3CL1 polypeptide. These immunomodulatory polypeptides may be the wild type polypeptide or a variant of a wild type polypeptide. In some cases, the immunomodulatory polypeptide is an activating (“stimulatory”) immunomodulatory polypeptide; e.g., the immunomodulatory polypeptide may produce an activating/stimulating effect on a T cell. Examples of activating immunomodulatory polypeptides include, e.g., CD80, CD86, 4-1BBL, OX40L, CD70, ICOS-L, CD40, ICAM (CD54), IL2, 1L7, IL12, IL15, IL17, IL21, 1L27, 1L23, GITRL. TGFβ, and lymphotoxin beta receptor. In some cases, the immunomodulatory polypeptide is an inhibitory (“suppressing”) immunomodulatory polypeptide; e.g., the immunomodulatory polypeptide s may produce a suppressing/inhibitory effect on a T cell. Examples of inhibitory immunomodulatory polypeptides include, e.g., PD-1H, PD-L1, PD-L2, TGFβ, FasL, HVEM, Galectin-9, ILT3, and ILT4. TGFβ polypeptides may produce either an activating/stimulating effect or a suppressing/inhibitory effect, depending on the context.

[0177] In some cases, the at least one immunomodulatory polypeptide is a reduced affinity variant, as described elsewhere herein. In some cases, the first or the second polypeptide comprises an Ig Fc polypeptide.

[0178] In some cases, a multiple disulfide-linked TMMP of the present disclosure (e.g., a double disulfide-linked TMMP) comprises an HLA-B Class I heavy chain polypeptide. In some cases, the HLA-B heavy chain polypeptide present in a multiple disulfide-linked TMMP of the present disclosure (e.g., a double disulfide-linked TMMP) comprises an amino acid sequence having at least 95%, at least 98%, or at least 99%, amino acid sequence identity to the HLA-B*0702, HLA-B*0801, HLA-B*1502, HLA-B*3802, HLA-B*4001, HLA-B*4601, or HLA-B*5301 amino acid sequence depicted in FIG. 10A, where the HLA-B heavy chain polypeptide comprises Y84C and A236C substitutions.

### HLA-B*0702 (Y84C; A236C)

[0179] In some cases, the HLA-B heavy chain polypeptide present in a multiple disulfide-linked TMMP of the present disclosure (e.g., a double disulfide-linked TMMP) comprises an amino acid sequence having at least 95%, at least 98%, at least 99%, or 100%, amino acid sequence identity to the following HLA-B*0702 (Y84C; A236C) amino acid sequence:

[0180] GSHSMRYFYTSVSRPGRGEPRFISVGYVDDTQFVRFDSDAASPREEPRAPWIEQE GPEYWDRNTQIYKAQAQTDRESLRNLRGCYNQSEAGSHTLQSMYGCDVGPDGRLLRGHDQYA YDGKDYIALNEDLRSWTAADTAAQITQRKWEAAREAEQRRAYLEGECVEWLRRYLENGKDKL ERADPPKTHVTHHPISDHEATLRCWALGFYPAEITLTWQRDGEDQTQDTELVETRPCGDRTFQK WAAVVVPSGEEQRYTCHVQHEGLPKPURLRWE (SEQ ID NO:350), where amino acid 84 is a Cys and amino acid 236 is a Cys.

### HLA-B*0801 (Y84C; A236C)

[0181] In some cases, the HLA-B heavy chain polypeptide present in a multiple disulfide-linked TMMP of the present disclosure (e.g., a double disulfide-linked TMMP) comprises an amino acid sequence having at least 95%, at least 98%, at least 99%, or 100%, amino acid sequence identity to the following HLA-B*0801 (Y84C; A236C) amino acid sequence:

[0182] GSHSMRYFDTAMSRPGRGEPRFISVGYVDDTQFVRFDSDAASPREFPRAPWIEQFE GPEYWDRNTQIFKTNTQTDRESLRNLRGCYNQSEAGSHTLQSMYGCDVGPDGRLLRGHNQYA YDGKDYIALNEDLRSWTAADTAAQITQRKWEAARVAEQDRAYLEGTCVEWLRRYLENGKDTL ERADPPKTHVTHHPISDHEATLRCWALGFYPAEITLTWQRDGEDQTQDTELVETRPCGDRTFQK WAAVVVPSGEEQRYTCHVQHEGLPKPLTLRWE (SEQ ID NO:351), where amino acid 84 is a Cys and amino acid 236 is a Cys.

### HLA-B*1502 (Y84C; A236C)

[0183] In some cases, the HLA-B heavy chain polypeptide present in a multiple disulfide-linked TMMP of the present disclosure (e.g., a double disulfide-linked TMMP) comprises an amino acid sequence having at least 95%, at least 98%, at least 99%, or 100%, amino acid sequence identity to the following HLA-B*1502 (Y84C; A236C) amino acid sequence:

[0184] GSHSMRYFYTAMSRPGRGEPRFIAVGYVDDTQFVRFDSDAASPRMAPRAPWIEQ EGPEYWDRNTQISKTNTQTYRESLRNLRGCYNQSEAGSHIIQRMYGCDVGPDGRLLRGYDQSA YDGKDYIALNEDLSSWTAADTAAQITQRKWEAAREAEQIRAYLEGICVEWLRRYILENGKETL QRADPPKTHVTHHPISDHEATLRCWALGFYPAEITLTWQRDGEDQTQDTELVETRPCGDRTFQ KWAAVVVPSGEEQRYTCHVQHEGLPKPLTLRWE (SEQ ID NO:352), where amino acid 84 is a Cys and amino acid 236 is a Cys.

### HLA-B*3802 (Y84C; A236C)

[0185] In some cases, the HLA-B heavy chain polypeptide present in a multiple disulfide-linked TMMP of the present disclosure (e.g., a double disulfide-linked TMMP) comprises an amino acid sequence having at least 95%, at least 98%, at least 99%, or 100%, amino acid sequence identity to the following HLA-B*3802 (Y84C; A236C) amino acid sequence:

[0186] GSHSMRYFYTSVSRPGRGEPRFISVGYVDDTQFVRFDSDAASPREEPRAPWIEQE GPEYWDRNTQICKTNTQTYRENLRTALRCYNQSEAGSHTLQRMYGCDVGPDGRLLRGHNQFA YDGKDYIALNEDLSSWTAADTAAQITQRKWEAARVAEQLRTYLEGTCVEWLRRYLENGKETL QRADPPKTHVTHHPISDHEATLRCWALGFYPAEITLTWQRDGEDQTQDTELVETRPCGDRTFQ KWAAVVVPSGEEQRYTCHVQHEGLPKPLTLRWE (SEQ ID NO:353), where amino acid 84 is a Cys and amino acid 236 is a Cys.

### HLA-B*4001 (Y84C; A2346C)

[0187] In some cases, the HLA-B heavy chain polypeptide present in a multiple disulfide-linked TMMP of the present disclosure (e.g., a double disulfide-linked TMMP) comprises an amino acid sequence having at least 95%, at least 98%, at least 99%, or 100%, amino acid sequence identity to the following HLA-B*4001 (Y84C; A236C) amino acid sequence:

[0188] GSHSMRYFHITAMSRPGRGEPRFITVGYVDDTLFVRFDSDATSPRKEPRAPWIEQE GPEYWDRETQTSKTNTQTYRESLRNIRGCYNQSEAGSHTILQRMYGCDVGPDGRIRGHNQYA YDGKDYIALNEDLRSWTAADTAAQISQRKLEAARVAEQLRAYLEGECVEWLRRYLENGKDKL ERADPPKTHVTHHPISDHEATLRCWALGFYPAEITLTWQRDGEDQTQDTELVETRPCGDRTFQK WAAVVVPSGEEQRYTCHVQHEGLPKPLTLRWE (SEQ ID NO:354) where amino acid 84 is a Cys and amino acid 236 is a Cys.

### HLA-B*4601 (Y84C; A236C)

[0189] In some cases, the HLA-B heavy chain polypeptide present in a multiple disulfide-linked TMMP of the present disclosure (e.g., a double disulfide-linked TMMP) comprises an amino acid sequence having at least 95%, at least 98%, at least 99%, or 100%, amino acid sequence identity to the following HLA-B*4601 (Y84C; A236C) amino acid sequence:

[0190] GSHSMRYFYTAMSRPGRGEPRFIAVGYVDDTQFVRFDSDAASPRMAPRAPWIEQ EGPEYWDRETQKYKRQAQTDRVSLRNLRGCYNQSEAGSHTLQRMYGCDVGPDGRLLRGHDQ SAYDGKDYIALNEDLSSWTAADTAAQITQRKWEAAREAEQWRAYLEGLCVEWLRRYLENGKE TLQRADPPKTHVTHHPISDHEATLRCWALGFYPAEITLTWQRDGEIQTQDTEILVETRPCGDRTF QKWAAVVVPSGEEQRYTCHVQHEGLPKPLTLRWE (SEQ ID NO:355) where amino acid 84 is a Cys and amino acid 236 is a Cys.

### HLA-B*5301 (Y84C; A236C)

[0191] In some cases, the HLA-B heavy chain polypeptide present in a multiple disulfide-linked TMMP of the present disclosure (e.g., a double disulfide-linked TMMP) comprises an amino acid sequence having at least 95%, at least 98%, at least 99%, or 100%, amino acid sequence identity to the following HLA-B*5301 (Y84C; A236C) amino acid sequence:

[0192] GSHSMRYFYTAMSRPGRGEPRFIAVGYVDDTQFVRFDSDAASPRTEPRAPWIEQE GPEYWDRNTQIFKTNTQTYRENLRIALRCYNQSEAGSHIIQRMYGCDLGPDGRLLRGHDQSAY DGKDYIALNEDLSSWTAADTAAQITQRKWEAARVAEQLRAYLEGLCVEWLRRYLENGKETLQ RADPPKTHVTHHPVSDHEATLRCWALGFYPAEITLTWQRDGEDQTQDTELVETRPCGDRTFQK WAAVVVPSGEEQRYTCHVQHEGLPKPLTLRWE (SEQ ID NO:356) where amino acid 84 is a Cys and amino acid 236 is a Cys.

### HLA-C

[0193] In some cases, a multiple disulfide-linked TMMP of the present disclosure (e.g., a double disulfide-linked TMMP) comprises: a) a first polypeptide comprising: i) a WT-1 peptide (e.g., 1 WT-1 peptide of from 4 amino acids to about 25 amino acids); and ii) a first MHC polypeptide, where the first polypeptide comprises a peptide linker between the WT-1 peptide and the first MHC polypeptide, where the peptide linker comprises a Cys residue, and where the first MHC polypeptide is a β2M polypeptide that comprises an amino acid substitution that introduces a Cys residue; and b) a second polypeptide comprising an HLA-C MHC Class I heavy chain comprising an amino acid sequence having at least 60%, at least 70%, at least 80%, at least 90%, at least 95%, at least 98%, at least 99%, or 100%, amino acid sequence identity to the following amino acid sequence: CSHSMRYFDTAVSRPGRGEPRFISVGYVDDTQFVRFDSDAASPRGEPRAPWVEQEGPEYWDRE TQNYKRQAQADRVSLRNLRGCYNQSEDGSHTLQRMYGCDLGPDGRLLRGYDQSAYDGKDYI ALNEDLRSWTAADTAAQITQRKIEAARAAEQILRAYLEGTCVEWILRRYLENGKETLQRAEPPKT HVTHHPLSDHEATLRCWALGFYPAEITLTWQRDGEDQTQDTELVETRPCGDGTFQKWAAVVV PSGQEQRYTCHMQHEGLQEPLTLSWEP (SEQ ID NO:357), where amino acid 84 is a Cys and amino acid 236 is a Cys; and c) at least one immunomodulatory polypeptide, where the first and/or the second polypeptide comprises the at least one immunomodulatory polypeptide. In some cases, the peptide linker comprises the amino acid sequence GCGGS (SEQ ID NO:318). In some cases, the peptide linker comprises the amino acid sequence GCGGS(GGGGS)n (SEQ ID NO:342), where n is an integer from 1 to 10. In some cases, the β2M polypeptide comprises an R12C substitution. For example, the β2M polypeptide can comprises an amino acid sequence having at least 90%, at least 95%, at least 98%, at least 99%, or 100%, amino acid sequence identity to the following amino acid sequence: IQRTPKIQVYSCHPAENGKSNFLNCYVSGFHPSDIEVDLLKNGERIEKVEHSDLSFSKDWSFYLL YYTEFTPTEKDEYACRVNHVTLSQPKIVKWDRDM (SEQ ID NO:314), where amino acid 12 is a Cys. The at least one immunomodulatory polypeptide can be a polypeptide that exerts an activating/stimulating effect on the target T cell or a suppressing/inhibitory effect on the target T cell. For example, the at least one immunomodulatory polypeptide can be a cytokine (e.g., an IL2 polypeptide, an IL7 polypeptide, an IL12 polypeptide, an IL15 polypeptide, an IL17 polypeptide, an IL21 polypeptide, an IL27 polypeptide, an IL-23 polypeptide, a TGFβ polypeptide, and the like; and including all family members, e.g., IL17A, IL-17B, IL-17C, IL-17D, IL-17E, IL-17F, IL-17E), a 4-1BBL polypeptide, an ICOS-L polypeptide, an OX-40L polypeptide, a CD80 polypeptide, a CD86 polypeptide, (CD80 and CD86 are also known as B7-1 and B7-2, respectively), a CD40 polypeptide, a CD70 polypeptide, a JAG1 (CD339) polypeptide, an ICAM (CD540 polypeptide, a PD-L1 polypeptide, a FasL polypeptide, a PD-L2 polypeptide, a PD-1H (VISTA) polypeptide, an ICOS-L (CD275) polypeptide, a GITRL polypeptide, an HVEM polypeptide, a CXCL10 polypeptide, a CXCL9 polypeptide, a CXCL11 polypeptide, a CXCL13 polypeptide, and a CX3CL1 polypeptide, a Galectin-9 polypeptide, a CD83 polypeptide, a CD30L polypeptide, a HLA-G polypeptide, a MICA polypeptide, a MICB polypeptide, a HVEM (CD270) polypeptide, a lymphotoxin beta receptor polypeptide, a 3/TR6 polypeptide, an ILT3 polypeptide, an ILT4 polypeptide, a CXCL10 polypeptide, a CXCL9 polypeptide, a CXCL11 polypeptide, a CXCL13 polypeptide, or a CX3CL1 polypeptide. These immunomodulatory polypeptides may be the wild type polypeptide or a variant of a wild type polypeptide. In some cases, the immunomodulatory polypeptide is an activating (“stimulatory”) immunomodulatory polypeptide; e.g., the immunomodulatory polypeptide may produce an activating/stimulating effect on a T cell. Examples of activating immunomodulatory polypeptides include, e.g., CD80, CD86, 4-1BBL, OX40L, CD70, ICOS-L, CD40, ICAM (CD54), IL2, 1L7, 1L12, IL15, IL17, IL21, IL27, IL23, GITRL. TGFβ, and lymphotoxin beta receptor. In some cases, the immunomodulatory polypeptide is an inhibitory (“suppressing”) immunomodulatory polypeptide; e.g., the immunomodulatory polypeptide s may produce a suppressing/inhibitory effect on a T cell. Examples of inhibitory immunomodulatory polypeptides include, e.g., PD-1H, PD-L1, PD-L2, TGFβ, FasL, HVEM, Galectin-9, ILT3, and ILT4. TGFβ polypeptides may produce either an activating/stimulating effect or a suppressing/inhibitory effect, depending on the context.

[0194] In some cases, the at least one immunomodulatory polypeptide is a reduced affinity variant, as described elsewhere herein. In some cases, the first or the second polypeptide comprises an Ig Fc polypeptide.

[0195] In some cases, a multiple disulfide-linked TMMP of the present disclosure (e.g., a double disulfide-linked TMMP) comprises an HLA-C Class I heavy chain polypeptide. In some cases, the HLA-C heavy chain polypeptide present in a multiple disulfide-linked TMMP of the present disclosure (e.g., a double disulfide-linked TMMP) comprises an amino acid sequence having at least 95%, at least 98%, or at least 99%, amino acid sequence identity to the HLA-C*0102, HLA-C*0303, HLA-C*0304, HLA-C*0401, HLA-C*0602, HLA-C*0701, HLA-C*0702, HLA-C*0801, or HLA-C*1502 amino acid sequence depicted in FIG. 11A, where the HLA-C heavy chain polypeptide comprises Y84C and A236C substitutions.

### HLA-C*01:02 (Y84C; A236C)

[0196] In some cases, the HLA-C heavy chain polypeptide present in a multiple disulfide-linked TMMP of the present disclosure (e.g., a double disulfide-linked TMMP) comprises an amino acid sequence having at least 95%, at least 98%, at least 99%, or 100%, amino acid sequence identity to the following HLA-C*01:02 (Y84C; A236C) amino acid sequence:

[0197] CSIISMKYFFTSVSRPGRGEPRFISVGYVDDTQFVRFDSDAASPRGEPRAPWVEQE GPEYWDRETQKYKRQAQTDRVSLRNLRGCYNQSEAGSHTLQWMCGCDLGPDGRLLRGYDQY AYDGKDYIALNEDLRSWTAADTAAQITQRKWEAAREAEQRRAYLEGTCVEWLRRYLENGKET LQRAEHPKTHVTIHHPVSDHEATLRCWALGFYPAEITLTWQWDGEDQTQDTELVETRPCGDGTF QKWAAVMVPSGEEQRYTCHVQHEGLPEPLTLRWEP (SEQ ID NO:358), where amino acid 84 is a Cys and amino acid 236 is a Cys.

### HLA-C*0303 (Y84C; A236C)

[0198] In some cases, the HLA-C heavy chain polypeptide present in a multiple disulfide-linked TMMP of the present disclosure (e.g., a double disulfide-linked TMMP) comprises an amino acid sequence having at least 95%, at least 98%, at least 99%, or 100%, amino acid sequence identity to the following HLA-C*03:03 (Y84C; A236C) amino acid sequence:

[0199] GSHSMRYFYTAVSRPGRGEPHFIAVGiYVDDTQFVRFDSDAASPRGEPRAPWVEQ EGPEYWDRETQKYKRQAQTDRVSLRNLRGCYNQSEARSHIIQRMYGCDVGPDGRLLRGYDQY AYDGKDYIALNEDLRSWTAADTAAQITQRKWEAAREAEQLRAYLEGLCVEWLRRYLKNGKET IQRAEHPKTHVTHHPVSDHEATLRCWALGFYPAEITLTWQWDGEDQTQDTELVETRPCGDGTF QKWAAVVVPSGEEQRYTCHVQHEGLPEPLTLRWEP (SEQ ID NO:359), where amino acid 84 is a Cys and amino acid 236 is a Cys.

### HLA-C*0304 (Y84C; A236C)

[0200] In some cases, the HLA-C heavy chain polypeptide present in a multiple disulfide-linked TMMP of the present disclosure (e.g., a double disulfide-linked TMMP) comprises an amino acid sequence having at least 95%, at least 98%, at least 99%, or 100%, amino acid sequence identity to the following HLA-C*03:04 (Y84C; A236C) amino acid sequence:

[0201] GSHSMRYFYTAVSRPGRGEPHFIAVGYVDDTQFVRFDSDAASPRGEPRAPWVEQ EGPEYWDRETQKYKRQAQTDRVSLRNLRGCYNQSEAGSHIIQRMYGCDVGPDGRLLRGYDQY AYDGKDYIALNEDLRSWTAADTAAQITQRKWEAAREAEQLRAYLEGLCVEWLRRYLKNGKET LQRAEHPKTHVTHHPVSDHEATLRCWALGFYPAEITLTWQWDGEDQTQDTELVETRPCGDGTF QKWAAVVVPSGEEQRYTCHVQHEGLPEPLTLRWEP (SEQ ID NO:360), where amino acid 84 is a Cys and amino acid 236 is a Cys.

### HLA-C*0401 (Y84C; A236C)

[0202] In some cases, the HLA-C heavy chain polypeptide present in a multiple disulfide-linked TMMP of the present disclosure (e.g., a double disulfide-linked TMMP) comprises an amino acid sequence having at least 95%, at least 98%, at least 99%, or 100%, amino acid sequence identity to the following HLA-C*04:01 (Y84C; A236C) amino acid sequence:

[0203] GSHSMRYFSTSVSWPGRGEPRFIAVGYVDDTQFVRFDSDAASPRGEPREPWVEQ EGPEYWDRETQKYKRQAQADRVNLRKLRGCYNQSEDGSHTLQRMFGCDLGPDGRLLRGYNQ FAYDGKDYIALNEDLRSWTAADTAAQITQRKWEAAREAEQRRAYLEGTCVEWLRRYLENGKE TLQRAEHPKTHVTHHPVSDHEATLRCWALGFYPAEITLTWQWDGEDQTQDTELVETRPCGDGT FQKWAAVVVPSGEEQRYTCIIVQIIEGLPEPLTLRWKP (SEQ ID NO:361), where amino acid 84 is a Cys and amino acid 236 is a Cys.

### HLA-C*0602 (Y84C; A236C)

[0204] In some cases, the HLA-C heavy chain polypeptide present in a multiple disulfide-linked TMMP of the present disclosure (e.g., a double disulfide-linked TMMP) comprises an amino acid sequence having at least 95%, at least 98%, at least 99%, or 100%, amino acid sequence identity to the following HLA-C*06:02 (Y84C; A236C) amino acid sequence:

[0205] CSHSMRYFDTAVSRPGRGEPRFISVGYVDDTQFVRFDSDAASPRGEPRAPWVEQ EGPEYWDRETQKYKRQAQADRVNLRKLRGCYNQSEDGSIITLQWMYGCDLGPDGRLLRCYD QSAYDGKDYIALNEDLRSWTAADTAAQITQRKWEAAREAEQWRAYLEGTCVEWLRRYLENG KETLQRAEHPKTHVTHHPVSDHEATLRCWALGFYPAEITLTWQRDGEDQTQDTELVETRPCGD GTFQKWAAVVVPSGEEQRYTCHVQHEGLPEPLTLRWEP (SEQ ID NO:362), where amino acid 84 is a Cys and amino acid 236 is a Cys.

### HLA-C*0701 (Y84C; A236C)

[0206] In some cases, the HLA-C heavy chain polypeptide present in a multiple disulfide-linked TMMP of the present disclosure (e.g., a double disulfide-linked TMMP) comprises an amino acid sequence having at least 95%, at least 98%, at least 99%, or 100%, amino acid sequence identity to the following HLA-C*07:01 (Y84C; A236C) amino acid sequence:

[0207] CSHSMRYFDTAVSRPGRGEPRFISVGYVDDTQFVRFDSDAASPRGEPRAPWVEQ EGPEYWDRETQNYKRQAQADRVSLRNLRGCYNQSEDGSHTLQRMYGCDLGPDGRLLRGYDQ SAYDGKDYIALNEDLRSWTAADTAAQITQRKLEAARAAEQLRAYLEGTCVEWLRRYLENGKE TLQRAEPPKTHVTHHPLSDHEATLRCWALGFYPAEITLTWQRDGEDQTQDTELVETRPCGDGT FQKWAAVVVPSGQEQRYTCHMQHEGLQEPLTLSWEP (SEQ ID NO:357), where amino acid 84 is a Cys and amino acid 236 is a Cys.

### HLA-C*0702 (Y84C; A236C)

[0208] In some cases, the HLA-C heavy chain polypeptide present in a multiple disulfide-linked TMMP of the present disclosure (e.g., a double disulfide-linked TMMP) comprises an amino acid sequence having at least 95%, at least 98%, at least 99%, or 100%, amino acid sequence identity to the following HLA-C*07:02 (Y84C; A236C) amino acid sequence:

[0209] CSHSMRYFDTAVSRPGRGEPRFISVGYVDDTQFVRFDSDAASPRGEPRAPWVEQ EGPEYWDRETQKYKRQAQADRVSLRNLRGCYNQSEDGSHTLQRMSGCDLGPDGRLLRGYDQS AYDGKDYIALNEDLRSWTAADTAAQITQRKLEAARAAEQLRAYLEGTCVEWLRRYLENGKET LQRAEPPKTHVTHHPLSDHEATLRCWALGFYPAEITLTWQRDGEDQTQDTELVETRPCGDGTF QKWAAVVVPSGQEQRYTCIIMQIIEGLQEPLTLSWEP (SEQ ID NO:404), where amino acid 84 is a Cys and amino acid 236 is a Cys.

### HLA-C*0801 (Y84C; A236C)

[0210] In some cases, the HLA-C heavy chain polypeptide present in a multiple disulfide-linked TMMP of the present disclosure (e.g., a double disulfide-linked TMMP) comprises an amino acid sequence having at least 95%, at least 98%, at least 99%, or 100%, amino acid sequence identity to the following HLA-C*08:01 (Y84C; A236C) amino acid sequence:

[0211] CSHSMRYFYTAVSRPGRGEPRFIAVGYVDDTQFVQFDSDAASPRGEPRAPWVEQ EGPEYWDRETQKYKRQAQTDRVSLRNLRGCYNQSEAGSHTLQRMYGCDLGPDGRLLRGYNQ FAYDGKDYIALNEDLRSWTAADTAAQITQRKWEAARTAEQLRAYLEGTCVEWLRRYLENGKK TLQRAEHPKTHVTHHPVSDHEATLRCWALGFYPAEITLTWQRDGEDQTQDTELVETRPCGDGT FQKWAAVVVPSGEEQRYTCHVQHEGLPEPLTLRWGP (SEQ ID NO:363), where amino acid 84 is a Cys and amino acid 236 is a Cys.

### HLA-C*1502 (Y84C; A236C)

[0212] In some cases, the HLA-C heavy chain polypeptide present in a multiple disulfide-linked TMMP of the present disclosure (e.g., a double disulfide-linked TMMP) comprises an amino acid sequence having at least 95%, at least 98%, at least 99%, or 100%, amino acid sequence identity to the following HLA-C*15:02 (Y84C; A236C) amino acid sequence:

[0213] CSHSMRYFYTAVSRPGRGEPHFIAVGYVDDTQFVRFDSDAASPRGEPRAPWVEQ EGPEYWDRETQNYKRQAQTDRVNLRKLRGCYNQSEAGSHIIQRMYGCDLGPDGRLLRGHDQL AYDGKDYIALNEDLRSWTAADTAAQITQRKWEAAREAEQLRAYLEGTCVEWLRRYLENGKET LQRAEHPKTHVTHHPVSDHEATLRCWALGFYPAEITLTWQRDGEDQTQDTELVETRPCGDGTF QKWAAVVVPSGEEQRYTCHVQHEGLPEPLTLRWEP (SEQ ID NO:364), where amino acid 84 is a Cys and amino acid 236 is a Cys.

### Scaffold Polypeptides

[0214] A TMMP can comprise an Fe polypeptide, or can comprise another suitable scaffold polypeptide.

[0215] Suitable scaffold polypeptides include antibody-based scaffold polypeptides and non-antibody-based scaffolds. Non-antibody-based scaffolds include, e.g., albumin, an XTEN (extended recombinant) polypeptide, transferrin, an Fc receptor polypeptide, an elastin-like polypeptide (see, e.g., Hassouneh et al. (2012) Methods Enzymol. 502:215; e.g., a polypeptide comprising a pentapeptide repeat unit of (Val-Pro-Gly-X-Gly; SEQ ID NO:59), where X is any amino acid other than proline), an albumin-binding polypeptide, a silk-like polypeptide (see, e.g., Valluzzi et al. (2002) Philos Trans R Soc Land B Biol Sci. 357:165), a silk-elastin-like polypeptide (SELP; see, e.g., Megeed et al. (2002) Adv Drug Deliv Rev. 54:1075), and the like. Suitable XTEN polypeptides include, e.g., those disclosed in WO 2009/023270, WO 2010/091122, WO 2007/103515, US 2010/0189682, and US 2009/0092582; see also Schellenberger et al. (2009) Nat Biotechnol. 27:1186). Suitable albumin polypeptides include, e.g., human serum albumin.

[0216] Suitable scaffold polypeptides will in some cases be a half-life extending polypeptides. Thus, in some cases, a suitable scaffold polypeptide increases the in vivo half-life (e.g., the serum half-life) of the TMMP, compared to a control TMMP lacking the scaffold polypeptide. For example, in some cases, a scaffold polypeptide increases the in vivo half-life (e.g., the serum half-life) of the TMMP, compared to a control TMMP lacking the scaffold polypeptide, by at least about 10%, at least about 15%, at least about 20%, at least about 25%, at least about 50%, at least about 2-fold, at least about 2.5-fold, at least about 5-fold, at least about 10-fold, at least about 25-fold, at least about 50-fold, at least about 100-fold, or more than 100-fold. As an example, in some cases, an Fc polypeptide increases the in vivo half-life (e.g., the serum half-life) of the TMMP, compared to a control TMMP lacking the Fe polypeptide, by at least about 10%, at least about 15%, at least about 20%, at least about 25%, at least about 50%, at least about 2-fold, at least about 2.5-fold, at least about 5-fold, at least about 10-fold, at least about 25-fold, at least about 50-fold, at least about 100-fold, or more than 100-fold.

### Fc Polypeptides

[0217] In some cases, the first and/or the second polypeptide chain of a TMMP of the present disclosure comprises an Fc polypeptide. The Fc polypeptide of a TMMP of the present disclosure can be a human IgG1 Fe, a human IgG2 Fc, a human IgG3 Fc, a human IgG4 Fc, etc. In some cases, the Fc polypeptide comprises an amino acid sequence having at least about 70%, at least about 75%, at least about 80%, at least about 85%, at least about 90%, at least about 95%, at least about 98%, at least about 99%, or 100%, amino acid sequence identity to an amino acid sequence of an Fc region depicted in FIG. 5A-5G. In some cases, the Fc region comprises an amino acid sequence having at least about 70%, at least about 75%, at least about 80%, at least about 85%, at least about 90%, at least about 95%, at least about 98%, at least about 99%, or 100%, amino acid sequence identity to the human IgG1 Fc polypeptide depicted in FIG. 5A. In some cases, the Fc region comprises an amino acid sequence having at least about 70%, at least about 75%, at least about 80%, at least about 85%, at least about 90%, at least about 95%, at least about 98%, at least about 99%, or 100%, amino acid sequence identity to the human IgG1 Fe polypeptide depicted in FIG. 5A; and comprises a substitution of N77; e.g., the Fc polypeptide comprises an N77A substitution. In some cases, the Fc polypeptide comprises an amino acid sequence having at least about 70%, at least about 75%, at least about 80%, at least about 85%, at least about 90%, at least about 95%, at least about 98%, at least about 99%, or 100%, amino acid sequence identity to the human IgG2 Fc polypeptide depicted in FIG. 5A; e.g., the Fe polypeptide comprises an amino acid sequence having at least about 70%, at least about 75%, at least about 80%, at least about 85%, at least about 90%, at least about 95%, at least about 98%, at least about 99%, or 100%, amino acid sequence identity to amino acids 99-325 of the human IgG2 Fc polypeptide depicted in FIG. 5A. In some cases, the Fc polypeptide comprises an amino acid sequence having at least about 70%, at least about 75%, at least about 80%, at least about 85%, at least about 90%, at least about 95%, at least about 98%, at least about 99%, or 100%, amino acid sequence identity to the human IgG3 Fe polypeptide depicted in FIG. 5A; e.g., the Fe polypeptide comprises an amino acid sequence having at least about 70%, at least about 75%, at least about 80%, at least about 85%, at least about 90%, at least about 95%, at least about 98%, at least about 99%, or 100%, amino acid sequence identity to amino acids 19-246 of the human IgG3 Fe polypeptide depicted in FIG. 5A. In some cases, the Fe polypeptide comprises an amino acid sequence having at least about 70%, at least about 75%, at least about 80%, at least about 85%, at least about 90%, at least about 95%, at least about 98%, at least about 99%, or 100%, amino acid sequence identity to the human IgM Fc polypeptide depicted in FIG. 5B; e.g., the Fc polypeptide comprises an amino acid sequence having at least about 70%, at least about 75%, at least about 80%, at least about 85%, at least about 90%, at least about 95%, at least about 98%, at least about 99%, or 100%, amino acid sequence identity to amino acids 1-276 to the human IgM Fc polypeptide depicted in FIG. 5B. In some cases, the Fc polypeptide comprises an amino acid sequence having at least about 70%, at least about 75%, at least about 80%, at least about 85%, at least about 90%, at least about 95%, at least about 98%, at least about 99%, or 100%, amino acid sequence identity to the human IgA Fe polypeptide depicted in FIG. 5C; e.g., the Fe polypeptide comprises an amino acid sequence having at least about 70%, at least about 75%, at least about 80%, at least about 85%, at least about 90%, at least about 95%, at least about 98%, at least about 99%, or 100%, amino acid sequence identity to amino acids 1-234 to the human IgA Fe polypeptide depicted in FIG. 5C.

[0218] In some cases, the Fe polypeptide comprises an amino acid sequence having at least about 70%, at least about 75%, at least about 80%, at least about 85%, at least about 90%, at least about 95%, at least about 98%, at least about 99%, or 100%, amino acid sequence identity to the human IgG4 Fc polypeptide depicted in FIG. 5C. In some cases, the Fc polypeptide comprises an amino acid sequence having at least about 70%, at least about 75%, at least about 80%, at least about 85%, at least about 90%, at least about 95%, at least about 98%, at least about 99%, or 100%, amino acid sequence identity to amino acids 100 to 327 of the human IgG4 Fe polypeptide depicted in FIG. 5C.

[0219] In some cases, the IgG4 Fe polypeptide comprises the following amino acid sequence:

(SEQ ID NO: 365)
PPCPSCPAPEFLGGPSVFLFPPKPKDTLMISRTPEVTCVVVDVSQEDPEV
QFNWYVDGVEVHNAKTKPREEQFNSTYRVVSVLTVLHQDWLNGKEYKCKV
SNKGLPSSIEKTISKAKGQPREPQVYTLPPSQEEMTKNQVSLTCLVKGFY
PSDIAVEWESNGQPENNYKTTPPVLDSDGSFFLYSRLTVDKSRWQEGNVF
SCSVMHEALHNHYTQKSLSLSPG.

[0220] In some cases, the Fe polypeptide present in a TMMP comprises the amino acid sequence depicted in FIG. 5A (human IgG1 Fc). In some cases, the Fe polypeptide present in a TMMP comprises the amino acid sequence depicted in FIG. 5A (human IgG1 Fe), except for a substitution of N297 (N77 of the amino acid sequence depicted in FIG. 5A) with an amino acid other than asparagine. In some cases, the Fe polypeptide present in a TMMP comprises the amino acid sequence depicted in FIG. 5C (human IgG1 Fe comprising an N297A substitution, which is N77 of the amino acid sequence depicted in FIG. 5A). In some cases, the Fe polypeptide present in a TMMP comprises the amino acid sequence depicted in FIG. 5A (human IgG1 Fc), except for a substitution of L234 (L14 of the amino acid sequence depicted in FIG. 5A) with an amino acid other than leucine. In some cases, the Fc polypeptide present in a TMMP comprises the amino acid sequence depicted in FIG. 5A (human IgG1 Fc), except for a substitution of L235 (L15 of the amino acid sequence depicted in FIG. 5A) with an amino acid other than leucine.

[0221] In some cases, the Fe polypeptide present in a TMMP comprises the amino acid sequence depicted in FIG. 5E. In some cases, the Fe polypeptide present in a TMMP comprises the amino acid sequence depicted in FIG. 5F. In some cases, the Fe polypeptide present in a TMMP comprises the amino acid sequence depicted in FIG. 5G (human IgG1 Fc comprising an L234A substitution and an L235A substitution, corresponding to positions 14 and 15 of the amino acid sequence depicted in FIG. 5G). In some cases, the Fc polypeptide present in a TMMP comprises the amino acid sequence depicted in FIG. 5A (human IgG1 Fc), except for a substitution of P331 (P111 of the amino acid sequence depicted in FIG. 5A) with an amino acid other than proline; in some cases, the substitution is a P331S substitution. In some cases, the Fc polypeptide present in a TMMP comprises the amino acid sequence depicted in FIG. 5A (human IgG1 Fc), except for substitutions at L234 and L235 (L14 and L15 of the amino acid sequence depicted in FIG. 5A) with amino acids other than leucine. In some cases, the Fc polypeptide present in a TMMP comprises the amino acid sequence depicted in FIG. 5A (human IgG1 Fc), except for substitutions at L234 and L235 (L14 and L15 of the amino acid sequence depicted in FIG. 5A) with amino acids other than leucine, and a substitution of P331 (P111 of the amino acid sequence depicted in FIG. 5A) with an amino acid other than proline. In some cases, the Fc polypeptide present in a TMMP comprises the amino acid sequence depicted in FIG. 5E (human IgG1 Fe comprising L234F, L235E, and P331S substitutions (corresponding to amino acid positions 14, 15, and 111 of the amino acid sequence depicted in FIG. 5E). In some cases, the Fc polypeptide present in a TMMP is an IgG1 Fc polypeptide that comprises L234A and L235A substitutions (substitutions of L14 and L15 of the amino acid sequence depicted in FIG. 5A with Ala), as depicted in FIG. 5G.

### Linkers

[0222] A TMMP of the present disclosure can include one or more linkers, where the one or more linkers are between one or more of: i) an MHC Class I polypeptide and an Ig Fe polypeptide, where such a linker is referred to herein as “L1”; ii) an immunomodulatory polypeptide and an MHC Class I polypeptide, where such a linker is referred to herein as “L2”; iii) a first immunomodulatory polypeptide and a second immunomodulatory polypeptide, where such a linker is referred to herein as “L3”; iv) a peptide antigen (“epitope”) and an MHC Class I polypeptide; v) an MHC Class I polypeptide and a dimerization polypeptide (e.g., a first or a second member of a dimerizing pair); and vi) a dimerization polypeptide (e.g., a first or a second member of a dimerizing pair) and an IgFc polypeptide.

[0223] Suitable linkers (also referred to as “spacers”) can be readily selected and can be of any of a number of suitable lengths, such as from 1 amino acid to 25 amino acids, from 3 amino acids to 20 amino acids, from 2 amino acids to 15 amino acids, from 3 amino acids to 12 amino acids, including 4 amino acids to 10 amino acids, 5 amino acids to 9 amino acids, 6 amino acids to 8 amino acids, or 7 amino acids to 8 amino acids. A suitable linker can be 1, 2, 3, 4, 5, 6, 7, 8, 9, 10, 11, 12, 13, 14, 15, 16, 17, 18, 19, 20, 21, 22, 23, 24, or 25 amino acids in length. In some cases, a linker has a length of from 25 amino acids to 50 amino acids, e.g., from 25 to 30, from 30 to 35, from 35 to 40, from 40 to 45, or from 45 to 50 amino acids in length.

[0224] Exemplary linkers include glycine polymers (G)ₙ, glycine-serine polymers (including, for example, (GS)ₙ, (GSGGS)ₙ (SEQ ID NO:366) and (GGGS)ₙ (SEQ ID NO:367), where n is an integer of at least one), glycine-alanine polymers, alanine-serine polymers, and other flexible linkers known in the art. Glycine and glycine-serine polymers can be used; both Gly and Ser are relatively unstructured, and therefore can serve as a neutral tether between components. Glycine polymers can be used; glycine accesses significantly more phi-psi space than even alanine, and is much less restricted than residues with longer side chains (see Scheraga, Rev. Computational Chem. 11173-142 (1992)). Exemplary linkers can comprise amino acid sequences including, but not limited to, GGSG (SEQ ID NO:368), GGSGG (SEQ ID NO:369). GSGSG (SEQ ID NO:370), GSGGG (SEQ ID NO:371), GGGSG (SEQ ID NO:372), GSSSG (SEQ ID NO:373), and the like. Exemplary linkers can include, e.g., Gly(Ser4)n (SEQ ID NO:374), where n is 1, 2, 3, 4, 5, 6, 7, 8, 9, or 10. In some cases, a linker comprises the amino acid sequence (GSSSS)n (SEQ ID NO:375), where n is 4. In some cases, a linker comprises the amino acid sequence (GSSSS)n (SEQ ID NO:376), where n is 5. In some cases, a linker comprises the amino acid sequence (GGGGS)n (SEQ ID NO:377), where n is 1. In some cases, a linker comprises the amino acid sequence (GGGGS)n (SEQ ID NO:378), where n is 2. In some cases, a linker comprises the amino acid sequence (GGGGS)n (SEQ ID NO:379), where n is 3. In some cases, a linker comprises the amino acid sequence (GGGGS)n (SEQ ID NO:380), where n is 4. In some cases, a linker comprises the amino acid sequence (GGGGS)n (SEQ ID NO:381), where n is 5. In some cases, a linker comprises the amino acid sequence (GGGGS)n (SEQ ID NO:382), where n is 6. In some cases, a linker comprises the amino acid sequence (GGGGS)n (SEQ ID NO:383), where n is 7. In some cases, a linker comprises the amino acid sequence (GGGGS)n (SEQ ID NO:384), where n is 8, In some cases, a linker comprises the amino acid sequence (GGGGS)n (SEQ ID NO:385), where n is 9, In some cases, a linker comprises the amino acid sequence (GGGGS)n (SEQ ID NO:386), where n is 10. In some cases, a linker comprises the amino acid sequence AAAGG (SEQ ID NO:387).

[0225] In some cases, a linker polypeptide, present in a first polypeptide of a TMMP of the present disclosure, includes a cysteine residue that can form a disulfide bond with a cysteine residue present in a second polypeptide of a TMMP of the present disclosure. In some cases, for example, a suitable linker comprises the amino acid sequence GCGGSGGGGSGGGGS (SEQ ID NO:317). As another example, a suitable linker can comprise the amino acid sequence GCGGS(G4S)n (SEQ ID NO:315), where n is 1, 2, 3, 4, 5, 6, 7, 8, or 9. For example, in some cases, the linker comprises the amino acid sequence GCGGSGGGGSGGGGSGGGGS (SEQ ID NO:316). As another example, the linker comprises the amino acid sequence GCGGSGGGGSGGGGS (SEQ ID NO:317).

### Epitopes

[0226] In some cases, an epitope (a peptide presenting one or more epitopes) present in a TMMP of the present disclosure is a WT-1 peptide, e.g., a WT-1 peptide that, together with MHC, presents an epitope to a TCR. Amino acid sequences of WT-1 isoforms are presented in FIG. 3A-3E. A WT-1 peptide that presents one or more epitopes is referred to herein as a “WT-1 peptide” or a “WT-1 epitope.” In some cases, a WT-1 epitope present in a TMMP of the present disclosure can be a peptide of from 4 to 25 contiguous amino acids (e.g., 4 amino acids (aa), 5 aa, 6 aa, 7 aa, 8 aa, 9 aa, 10-15 aa, 15-20 aa, or 20-25 aa) of an amino acid sequence having at least 90%, at least 95%, at least 98%, at least 99%, or 100%, amino acid sequence identity to the WT-1 amino acid sequence depicted in any one of FIG. 3A-3E. In some cases, a WT-1 epitope present in a TMMP of the present disclosure can be a peptide of from 4 to 25 contiguous amino acids (e.g., 4 amino acids (aa), 5 aa, 6 aa, 7 aa, 8 aa, 9 aa, 10-15 aa, 15-20 aa, or 20-25 aa) of an amino acid sequence having at least 90%, at least 95%, at least 98%, at least 99%, or 100%, amino acid sequence identity to the WT-1 amino acid sequence depicted in FIG. 3A. In some cases, a WT-1 epitope present in a TMMP of the present disclosure can be a peptide of from 4 to 25 contiguous amino acids (e.g., 4 amino acids (aa), 5 aa, 6 aa, 7 aa, 8 aa, 9 aa, 10-15 aa, 15-20 aa, or 20-25 aa) of an amino acid sequence having at least 90%, at least 95%, at least 98%, at least 99%, or 100%, amino acid sequence identity to the WT-1 amino acid sequence depicted in FIG. 3B. In some cases, a WT-1 epitope present in a TMMP of the present disclosure can be a peptide of from 4 to 25 contiguous amino acids (e.g., 4 amino acids (aa), 5 aa, 6 aa, 7 aa, 8 aa, 9 aa, 10-15 aa, 15-20 aa, or 20-25 aa) of an amino acid sequence having at least 90%, at least 95%, at least 98%, at least 99%, or 100%, amino acid sequence identity to the WT-1 amino acid sequence depicted in FIG. 3C. In some cases, a WT-1 epitope present in a TMMP of the present disclosure can be a peptide of from 4 to 25 contiguous amino acids (e.g., 4 amino acids (aa), 5 aa, 6 aa, 7 aa, 8 aa, 9 aa, 10-15 aa, 15-20 aa, or 20-25 aa) of an amino acid sequence having at least 90%, at least 95%, at least 98%, at least 99%, or 100%, amino acid sequence identity to the WT-1 amino acid sequence depicted in FIG. 3D. In some cases, a WT-1 epitope present in a TMMP of the present disclosure can be a peptide of from 4 to 25 contiguous amino acids (e.g., 4 amino acids (aa), 5 aa, 6 aa, 7 aa, 8 aa, 9 aa, 10-15 aa, 15-20 aa, or 20-25 aa) of an amino acid sequence having at least 90%, at least 95%, at least 98%, at least 99%, or 100%, amino acid sequence identity to the WT-1 amino acid sequence depicted in FIG. 3E. In some cases, a WT-1 epitope present in a TMMP of the present disclosure is 6 amino acids in length. In some cases, a WT-1 epitope present in a TMMP of the present disclosure is 7 amino acids in length. In some cases, a WT-1 epitope present in a TMMP of the present disclosure is 8 amino acids in length. In some cases, a WT-1 epitope present in a TMMP of the present disclosure is 9 amino acids in length. In some cases, a WT-1 epitope present in a TMMP of the present disclosure is 10 amino acids in length. In some cases, a WT-1 epitope present in a TMMP of the present disclosure is 11 amino acids in length. In some cases, a WT-1 epitope present in a TMMP of the present disclosure is from 6 amino acids to 25 amino acids in length. In some cases, a WT-1 epitope present in a TMMP of the present disclosure is from 6 amino acids to 20 amino acids in length. In some cases, a WT-1 epitope present in a TMMP of the present disclosure is from 7 amino acids to 25 amino acids in length. In some cases, a WT-1 epitope present in a TMMP of the present disclosure is from 7 amino acids to 20 amino acids in length. In some cases, a WT-1 epitope present in a TMMP of the present disclosure is at least 4 amino acids in length, at least 6 amino acids in length, or at least 7 amino acids in length.

[0227] An epitope present in a TMMP of the present disclosure can have a length of from about 4 amino acids to about 25 amino acids, e.g., the epitope can have a length of from 4 amino acids (aa) to 10 aa, from 10 an to 15 aa, from 15 aa to 20 aa, or from 20 an to 25 aa. For example, an epitope present in a TMMP of the present disclosure can have a length of 4 amino acids (aa), 5 aa, 6 aa, 7, aa, 8 aa, 9 aa, 10 aa, 11 aa, 12 aa, 13 aa, 14 aa, 15 aa, 16 aa, 17 aa, 18 aa, 19 aa, 20 aa, 21 aa, 22 aa, 23 aa, 24 aa, or 25 aa. In some cases, an epitope present in a TMMP has a length of from 5 amino acids to 10 amino acids, e.g., 5 aa, 6 aa, 7 aa, 8 aa, 9 aa, or 10 aa.

[0228] A WT-1 epitope present in a TMMP of the present disclosure is a peptide specifically bound by a T-cell, i.e., the epitope is specifically bound by a WT-1 epitope-specific T cell. An epitope-specific T cell binds an epitope having a reference amino acid sequence, but does not substantially bind an epitope that differs from the reference amino acid sequence. For example, an epitope-specific T cell binds an epitope having a reference amino acid sequence, and binds an epitope that differs from the reference amino acid sequence, if at all, with an affinity that is less than 10⁻⁶ M, less than 10⁻⁵ M, or less than 10⁻⁴ M. An epitope-specific T cell can bind an epitope for which it is specific with an affinity of at least 10⁻⁷ M, at least 10⁻⁸ M, at least 10⁻⁹ M, or at least 10⁻¹⁰ M.

[0229] Examples of WT-1 peptides suitable for inclusion in a TMMP of the present disclosure include, but are not limited to, CMTWNQMNLGATLKG (SEQ ID NO:223), WNQMNLGATLKGVAA (SEQ ID NO:224), CMTWNYMNLGATLKG (SEQ ID NO:225), WNYMNLGATLKGVAA (SEQ ID NO:226), MTWNQMNLGATLKGV (SEQ ID NO:227), TWNQMNLGATLKGVA (SEQ ID NO:228), CMTWNLMNLGATLKG (SEQ ID NO:229). MTWNLMNLGATLKGV (SEQ ID NO:230). TWNLMNLGATLKGVA (SEQ ID NO:231). WNLMNLGATLKGVAA (SEQ ID NO:232), MNLGATLK (SEQ ID NO:233), MTWNYMNLGATLKGV (SEQ ID NO:234), TWNYMNLGATLKGVA (SEQ ID NO:235), CMTWNQMNLGATLKGVA (SEQ ID NO:236), CMTWNLMNLGATLKGVA (SEQ ID NO:237), CMTWNYMNLGATLKGVA (SEQ ID NO:238), GYLRNPTAC (SEQ ID NO:239), GALRNPTAL (SEQ ID NO:240), YALRNPTAC (SEQ ID NO:241), GLLRNPTAC (SEQ ID NO:242), RYRPHPGAL (SEQ ID NO:243), YQRPHPGAL (SEQ ID NO:244), RLRPIIPGAL (SEQ ID NO:245), RIRPIPGAL (SEQ ID NO:246), QFPNIISFKIIEDPMGQ (SEQ ID NO:247), HSFKHEDPY (SEQ ID NO:248), QFPNHSFKHEDPM (SEQ ID NO:249), QFPNHSFKHEDPY (SEQ ID NO:250), KRPFMCAYPGCNK (SEQ ID NO:251), KRPFMCAYPGCYK (SEQ ID NO:252), FMCAYPGCY (SEQ ID NO:253). FMCAYPGCK (SEQ ID NO:254), KRPFMCAYPGCNKRY (SEQ ID NO:255), SEKRPFMCAYPGCNK (SEQ ID NO:256), KRPFMCAYPGCYKRY (SEQ ID NO:257), NLMNLGATL (SEQ ID NO:258), VLDFAPPGA (SEQ ID NO:259); RMFPNAPYL (SEQ ID NO:260); CMTWNQMN (SEQ ID NO:261); CYTWNQMNL (SEQ ID NO:269); NYMNLGATL (SEQ ID NO:263); YMFPNAPYIL (SEQ ID NO:264); SLGEQQYSV (SEQ ID NO:265); CMTWNQMNL (SEQ ID NO:266); and NQMNLGATL (SEQ ID NO:267). In some cases, the WT-1 peptide present in a TMMP of the present disclosure is CMTWNQMN (SEQ ID NO:261). In some cases, the WT-1 peptide present in a TMMP of the present disclosure is CYTWNQMNL (SEQ ID NO:269).

[0230] In some cases, the WT-1 peptide present in a TMMP of the present disclosure presents an HLA-A*2402-restricted epitope. WT-1 peptides that present an HLA-A*2402-restricted epitope include, e.g., CMTWNQMN (SEQ ID NO:261); NYMNLGATL (SEQ ID NO:263) (WT-1 239-247; Q240Y); CYTWNQMNL (SEQ ID NO:269) (WT-1 235-243); CMTWNQMNL (SEQ ID NO:266) (WT-1 235-243); NQMNLGATL (SEQ ID NO:267) (WT-1 239-247); and NLMNLGATL (SEQ ID NO:258) (WT-1 239-247; Q240L).

[0231] In some cases, the WT-1 peptide present in a TMMP of the present disclosure presents an HLA-A*0201-restricted epitope. WT-1 peptides that present an HLA-A*0201-restricted epitope include, e.g., VLDFAPPGA (SEQ ID NO:259) (WT-1 37-45); RMFPNAPYL (SEQ ID NO:260) (WT-1 126-134); YMFPNAPYL (SEQ ID NO:264) (WT-1 126-134; R126Y); SLGEQQYSV (SEQ ID NO:265) (WT-1 187-195); and NLMNLGATL (SEQ ID NO:258) (WT-1 239-247; Q240L).

### HLA/Peptide Binding Assays

[0232] Whether a given peptide (e.g., WT-1 peptide) binds a class I HLA (comprising an HLA heavy chain and a β2M polypeptide), and, when bound to the HLA complex, can effectively present an epitope to a TCR, can be determined using any of a number of well-known methods. Assays include binding assays and T-cell activation assays.

### Cell-Based Binding Assay

[0233] As one example, a cell-based peptide-induced stabilization assay can be used to determine peptide-HLA class I binding. In this assay, a peptide of interest is allowed to bind to a TAP-deficient cell, i.e., a cell that has defective transporter associated with antigen processing (TAP) machinery, and consequently, few surface class I molecules. Such cells include, e.g., the human T2 cell line (T2 (174×CEM.T2; American Type Culture Collection (ATCC) No. CRL-1992). Henderson et al. (1992) Science 255:1264. Without efficient TAP-mediated transport of cytosolic peptides into the endoplasmic reticulum, assembled class I complexes are structurally unstable, and retained only transiently at the cell surface. However, when T2 cells are incubated with an exogenous peptide capable of binding class I, surface peptide-HLA class I complexes are stabilized and can be detected by flow cytometry with, e.g., a pan anti-class I monoclonal antibody. The stabilization and resultant increased life-span of peptide-HLA complexes on the cell surface by the addition of a peptide validates their identity. Analysis can be carried out using flow cytometry, e.g., where the pan-HLA class I antibody comprises a fluorescent label. Binding of the peptide to various allelic forms of HLA H chains can be tested by genetically modifying the T2 cells to express an allelic HLA H chain of interest.

[0234] The following is a non-limiting example of use of a T2 assay to assess peptide binding to HLA A*0201. T2 cells are washed in cell culture medium, and concentrated to 10⁶ cells/ml. Peptides of interest are prepared in ccli culture medium and serially diluted providing concentrations of 200 μM. 100 μM, 20 μM and 2 μM. The cells are mixed 1:1 with each peptide dilution to give a final volume of 200 μL and final peptide concentrations of 100 μM, 50 μM, 10 μM and 1 μM. A HLA A*0201 binding peptide, GILGFVFTL (SEQ ID NO: 395), and a non-HLA A*0201-restricted peptide, HPVGEADYF (SEQ ID NO: 396) (HLA-B*3501), are included as positive and negative controls, respectively. The cell/peptide mixtures are kept at 37° C. 5% CO₂ for ten minutes; then incubated at room temperature overnight. Cells are then incubated for 2 hours at 37° C. and stained with a fluorescently-labeled anti-human HLA antibody. The cells are washed twice with phosphate-buffered saline and analyzed using flow cytometry. The average mean fluorescence intensity (MFI) of the anti-HLA antibody staining is used to measure the strength of binding.

### Biochemical Binding Assay

[0235] HLA polypeptides (HLA heavy chain polypeptide complexed with β2M polypeptide) can be tested for binding to a peptide of interest in a cell-free in vitro assay system. For example, a labeled reference peptide (e.g., fluorescently labeled) is allowed to bind to HLA polypeptides (HLA heavy chain polypeptide complexed with β2M polypeptide), to form an HLA-reference peptide complex. The ability of a test peptide of interest to displace the labeled reference peptide from the HLA-reference peptide complex is tested. The relative binding affinity is calculated as the amount of test peptide needed to displace the bound reference peptide. See, e.g., van der Burg et al. (1995) Human Immunol. 44:189.

[0236] As another example, a peptide of interest can be incubated with an HLA molecule (HLA heavy chain complexed with a β2M polypeptide), and the stabilization of the HLA/peptide complex can be measured in an immunoassay format. The ability of a peptide of interest to stabilize an HLA molecule is compared to that of a control peptide presenting a known T-cell epitope. Detection of stabilization is based on the presence or absence of the native conformation of the HLA/peptide complex, detected using an anti-HLA antibody. See, e.g., Westrop et al. (2009) J. Immunol. Methods 341:76; Steinitz et al. (2012) Blood 119:4073; and U.S. Pat. No. 9,205,144.

### T-Cell Activation Assays

[0237] Whether a given peptide binds a class I HLA (comprising an HLA heavy chain and a β2M polypeptide), and, when bound to the HLA complex, can effectively present an epitope to a TCR, can be determined by assessing T-cell response to the peptide-HILA complex. T-cell responses that can be measured include, e.g., interferon-gamma (IFNγ) production, cytotoxic activity, and the like.

### ELISPOT Assay

[0238] Suitable assays include, e.g., an enzyme linked immunospot (ELISPOT) assay. In this assay, production of IFNγ by CD8⁺ T cells is measured following with an antigen-presenting cell (APC) that presents a peptide of interest complexed with HLA class I. Antibody to IFNγ is immobilized on wells of a multi-well plate. APCs are added to the wells, and incubated for a period of time with a peptide of interest, such that the peptide binds HLA class I on the surface of the APCs. CD8⁺ T cells specific for the peptide are added to the wells, and the plate is incubated for about 24 hours. The wells are then washed, and any IFNγ bound to the immobilized anti-IFNγ antibody is detected using a detectably labeled anti-IFNγ antibody. A colorimetric assay can be used. For example, the detectably labeled anti-IFNγ antibody can be a biotin-labeled anti-IFNγ antibody, which can be detected using, e.g., streptavidin conjugated to alkaline phosphatase. A BCIP/NBT (5-bromo-4-chloro-3-indolyl phosphate/nitro blue tetrazolium) solution is added, to develop the assay. The presence of IFNγ-secreting T cells is identified by colored spots. Negative controls include APCs not contacted with the peptide. APCs expressing various HLA H chain alleles can be used to determine whether a peptide of interest effectively binds to a HLA class I molecule comprising a particular HLA H chain.

### Cytotoxicity Assays

[0239] Whether a given peptide binds to a particular HLA class I H chain and, when bound to a HLA class I complex comprising the H chain, can effectively present an epitope to a TCR, can also be determined using a cytotoxicity assay. A cytotoxicity assay involves incubation of a target cell with a cytotoxic CD8⁺ T cell. The target cell displays on its surface a peptide/HLA class I complex comprising a peptide of interest and an HLA class I molecule comprising an HLA H chain to be tested. The target cells can be radioactively labeled, e.g., with ⁵¹Cr. Whether the target cell effectively presents an epitope to a TCR on the cytotoxic CD8+ T cell, thereby inducing cytotoxic activity by the CD8⁺ T cell toward the target cell, is determined by measuring release of ⁵¹Cr from the lysed target cell. Specific cytotoxicity can be calculated as the amount of cytotoxic activity in the presence of the peptide minus the amount of cytotoxic activity in the absence of the peptide.

Detection of Antigen-Specific T Cells with Peptide-HLA Tetramers

[0240] As another example, multimers (e.g., tetramers) of peptide-HLA complexes are generated with fluorescent or heavy metal tags. The multimers can then be used to identify and quantify specific T cells via flow cytometry (FACS) or mass cytometry (CyTOF). Detection of epitope-specific T cells provides direct evidence that the peptide-bound HLA molecule is capable of binding to a specific TCR on a subset of antigen-specific T cells. See, e.g., Klenerman et al. (2002) Nature Reviews Immunol. 2:263.

### Immunomodulatory Polypeptides

[0241] In some cases, an immunomodulatory polypeptide present in a TMMP of the present disclosure is a wild-type immunomodulatory polypeptide. In other cases, an immunomodulatory polypeptide present in a TMMP of the present disclosure is a variant immunomodulatory polypeptide that has reduced affinity for a co-immunomodulatory polypeptide, compared to the affinity of a corresponding wild-type immunomodulatory polypeptide for the co-immunomodulatory polypeptide. Suitable immunomodulatory domains that exhibit reduced affinity for a co-immunomodulatory domain can have from 1 amino acid (aa) to 20 aa differences from a wild-type immunomodulatory domain. For example, in some cases, a variant immunomodulatory polypeptide present in a TMMP of the present disclosure differs in amino acid sequence by 1 aa, 2 aa, 3 aa, 4 aa, 5 aa, 6 aa, 7 aa, 8 aa, 9 aa, or 10 aa, from a corresponding wild-type immunomodulatory polypeptide. As another example, in some cases, a variant immunomodulatory polypeptide present in a TMMP of the present disclosure differs in amino acid sequence by 11 aa, 12 aa, 13 aa, 14 aa, 15 aa, 16 aa, 17 aa, 18 aa, 19 aa, or 20 aa, from a corresponding wild-type immunomodulatory polypeptide. As an example, in some cases, a variant immunomodulatory polypeptide present in a TMMP of the present disclosure includes 1, 2, 3, 4, 5, 6, 7, 8, 9, or 10 amino acid substitutions, compared to a corresponding reference (e.g., wild-type) immunomodulatory polypeptide. In some cases, variant immunomodulatory polypeptide present in a TMMP of the present disclosure includes a single amino acid substitution compared to a corresponding reference (e.g., wild-type) immunomodulatory polypeptide. In some cases, variant immunomodulatory polypeptide present in a TMMP of the present disclosure includes 2 amino acid substitutions (e.g., no more than 2 amino acid substitutions) compared to a corresponding reference (e.g., wild-type) immunomodulatory polypeptide. In some cases, variant immunomodulatory polypeptide present in a TMMP of the present disclosure includes 3 amino acid substitutions (e.g., no more than 3 amino acid substitutions) compared to a corresponding reference (e.g., wild-type) immunomodulatory polypeptide. In some cases, variant immunomodulatory polypeptide present in a TMMP of the present disclosure includes 4 amino acid substitutions (e.g., no more than 4 amino acid substitutions) compared to a corresponding reference (e.g., wild-type) immunomodulatory polypeptide. In some cases, variant immunomodulatory polypeptide present in a TMMP of the present disclosure includes 5 amino acid substitutions (e.g., no more than 5 amino acid substitutions) compared to a corresponding reference (e.g., wild-type) immunomodulatory polypeptide. In some cases, variant immunomodulatory polypeptide present in a TMMP of the present disclosure includes 6 amino acid substitutions (e.g., no more than 6 amino acid substitutions) compared to a corresponding reference (e.g., wild-type) immunomodulatory polypeptide. In some cases, variant immunomodulatory polypeptide present in a TMMP of the present disclosure includes 7 amino acid substitutions (e.g., no more than 7 amino acid substitutions) compared to a corresponding reference (e.g., wild-type) immunomodulatory polypeptide. In some cases, variant immunomodulatory polypeptide present in a TMMP of the present disclosure includes 8 amino acid substitutions (e.g., no more than 8 amino acid substitutions) compared to a corresponding reference (e.g., wild-type) immunomodulatory polypeptide. In some cases, variant immunomodulatory polypeptide present in a TMMP of the present disclosure includes 9 amino acid substitutions (e.g., no more than 9 amino acid substitutions) compared to a corresponding reference (e.g., wild-type) immunomodulatory polypeptide. In some cases, variant immunomodulatory polypeptide present in a TMMP of the present disclosure includes 10 amino acid substitutions (e.g., no more than 10 amino acid substitutions) compared to a corresponding reference (e.g., wild-type) immunomodulatory polypeptide.

[0242] In some cases, variant immunomodulatory polypeptide present in a TMMP of the present disclosure includes 11 amino acid substitutions (e.g., no more than 11 amino acid substitutions) compared to a corresponding reference (e.g., wild-type) immunomodulatory polypeptide.

[0243] In some cases, variant immunomodulatory polypeptide present in a TMMP of the present disclosure includes 12 amino acid substitutions (e.g., no more than 12 amino acid substitutions) compared to a corresponding reference (e.g., wild-type) immunomodulatory polypeptide.

[0244] In some cases, variant immunomodulatory polypeptide present in a TMMP of the present disclosure includes 13 amino acid substitutions (e.g., no more than 13 amino acid substitutions) compared to a corresponding reference (e.g., wild-type) immunomodulatory polypeptide.

[0245] In some cases, variant immunomodulatory polypeptide present in a TMMP of the present disclosure includes 14 amino acid substitutions (e.g., no more than 14 amino acid substitutions) compared to a corresponding reference (e.g., wild-type) immunomodulatory polypeptide.

[0246] In some cases, variant immunomodulatory polypeptide present in a TMMP of the present disclosure includes 15 amino acid substitutions (e.g., no more than 15 amino acid substitutions) compared to a corresponding reference (e.g., wild-type) immunomodulatory polypeptide.

[0247] In some cases, variant immunomodulatory polypeptide present in a TMMP of the present disclosure includes 16 amino acid substitutions (e.g., no more than 16 amino acid substitutions) compared to a corresponding reference (e.g., wild-type) immunomodulatory polypeptide.

[0248] In some cases, variant immunomodulatory polypeptide present in a TMMP of the present disclosure includes 17 amino acid substitutions (e.g., no more than 17 amino acid substitutions) compared to a corresponding reference (e.g., wild-type) immunomodulatory polypeptide.

[0249] In some cases, variant immunomodulatory polypeptide present in a TMMP of the present disclosure includes 18 amino acid substitutions (e.g., no more than 18 amino acid substitutions) compared to a corresponding reference (e.g., wild-type) immunomodulatory polypeptide.

[0250] In some cases, variant immunomodulatory polypeptide present in a TMMP of the present disclosure includes 19 amino acid substitutions (e.g., no more than 19 amino acid substitutions) compared to a corresponding reference (e.g., wild-type) immunomodulatory polypeptide.

[0251] In some cases, variant immunomodulatory polypeptide present in a TMMP of the present disclosure includes 20 amino acid substitutions (e.g., no more than 20 amino acid substitutions) compared to a corresponding reference (e.g., wild-type) immunomodulatory polypeptide.

[0252] As discussed above, a variant immunomodulatory polypeptide suitable for inclusion in a TMMP of the present disclosure exhibits reduced affinity for a cognate co-immunomodulatory polypeptide, compared to the affinity of a corresponding wild-type immunomodulatory polypeptide for the cognate co-immunomodulatory polypeptide.

[0253] Exemplary pairs of immunomodulatory polypeptide and cognate co-immunomodulatory polypeptide include, but are not limited to:

[0254] a) 4-1BBL (immunomodulatory polypeptide) and 4-1BB (cognate co-immunomodulatory polypeptide);

[0255] b) PD-L1 (immunomodulatory polypeptide) and PD1 (cognate co-immunomodulatory polypeptide);

[0256] c) IL-2 (immunomodulatory polypeptide) and IL-2 receptor (cognate co-immunomodulatory polypeptide);

[0257] d) CD80 (immunomodulatory polypeptide) and CD86 (cognate co-immunomodulatory polypeptide);

[0258] e) CD86 (immunomodulatory polypeptide) and CD28 (cognate co-immunomodulatory polypeptide);

[0259] f) OX40L (CD252) (immunomodulatory polypeptide) and OX40 (CD134) (cognate co-immunomodulatory polypeptide);

[0260] g) Fas ligand (immunomodulatory polypeptide) and Fas (cognate co-immunomodulatory polypeptide);

[0261] h) ICOS-L (immunomodulatory polypeptide) and ICOS (cognate co-immunomodulatory polypeptide);

[0262] i) ICAM (immunomodulatory polypeptide) and LFA-1 (cognate co-immunomodulatory polypeptide);

[0263] j) CD30L (immunomodulatory polypeptide) and CD30 (cognate co-immunomodulatory polypeptide);

[0264] k) CD40 (immunomodulatory polypeptide) and CD40L (cognate co-immunomodulatory polypeptide);

[0265] l) CD83 (immunomodulatory polypeptide) and CD83L (cognate co-immunomodulatory polypeptide);

[0266] m) HVEM (CD270) (immunomodulatory polypeptide) and CD160 (cognate co-immunomodulatory polypeptide);

[0267] n) JAG1 (CD339) (immunomodulatory polypeptide) and Notch (cognate co-immunomodulatory polypeptide);

[0268] o) JAG1 (immunomodulatory polypeptide) and CD46 (cognate co-immunomodulatory polypeptide);

[0269] p) CD80 (immunomodulatory polypeptide) and CTLA4 (cognate co-immunomodulatory polypeptide);

[0270] q) CD86 (immunomodulatory polypeptide) and CTLA4 (cognate co-immunomodulatory polypeptide); and

[0271] r) CD70 (immunomodulatory polypeptide) and CD27 (cognate co-immunomodulatory polypeptide).

[0272] In some cases, a variant immunomodulatory polypeptide present in a TMMP of the present disclosure has a binding affinity for a cognate co-immunomodulatory polypeptide that is from 100 nM to 100 μM. For example, in some cases, a variant immunomodulatory polypeptide present in a TMMP of the present disclosure has a binding affinity for a cognate co-immunomodulatory polypeptide that is from about 100 nM to 150 nM, from about 150 nM to about 200 nM, from about 200 nM to about 250 nM, from about 250 nM to about 300 nM, from about 300 nM to about 350 nM, from about 350 nM to about 400 nM, from about 400 nM to about 500 nM, from about 500 nM to about 600 nM, from about 600 nM to about 700 nM, from about 700 nM to about 800 nM, from about 800 nM to about 900 nM, from about 900 nM to about 1 μM, to about 1 μM to about 5 μM, from about 5 μM to about 10 μM, from about 10 μM to about 15 μM, from about 15 μM to about 20 μM, from about 20 μM to about 25 μM, from about 25 μM to about 50 μM, from about 50 μM to about 75 μM, or from about 75 KM to about 100 μM.

[0273] A variant immunomodulatory polypeptide present in a TMMP of the present disclosure exhibits reduced affinity for a cognate co-immunomodulatory polypeptide. Similarly, a TMMP of the present disclosure that comprises a variant immunomodulatory polypeptide exhibits reduced affinity for a cognate co-immunomodulatory polypeptide. Thus, for example, a TMMP of the present disclosure that comprises a variant immunomodulatory polypeptide has a binding affinity for a cognate co-immunomodulatory polypeptide that is from 100 nM to 100 μM. For example, in some cases, a TMMP of the present disclosure that comprises a variant immunomodulatory polypeptide has a binding affinity for a cognate co-immunomodulatory polypeptide that is from about 100 nM to 150 nM, from about 150 nM to about 200 nM, from about 200 nM to about 250 nM, from about 250 nM to about 300 nM, from about 300 nM to about 350 nM, from about 350 nM to about 400 nM, from about 400 nM to about 500 nM, from about 500 nM to about 600 nM, from about 600 nM to about 700 nM, from about 700 nM to about 800 nM, from about 800 nM to about 900 nM, from about 900 nM to about 1 μM, to about 1 μM to about 5 μM, from about 5 μM to about 10 μM, from about 10 μM to about 15 μM, from about 15 μM to about 20 μM, from about 20 μM to about 25 μM, from about 25 μM to about 50 μM, from about 50 M to about 75 μM, or from about 75 μM to about 100 μM.

[0274] As depicted schematically in FIG. 19, an immunomodulatory polypeptide (i.e., one or more immunomodulatory polypeptides) can be present in a TMMP of the present disclosure at any of a variety of positions. FIG. 19 depicts the position of two copies of a variant IL-2 polypeptide; however, the immunomodulatory polypeptide can be any of a variety of immunomodulatory polypeptide, as described herein. As depicted in FIG. 19, an immunomodulatory polypeptide can be: 1) N-terminal to the MHC class I heavy chain; 2) C-terminal to the MHC class I heavy chain and N-terminal to the Ig Fe polypeptide; in other words, between the MHC class I heavy chain and the Ig Fc polypeptide; 3) C-terminal to the Ig Fe polypeptide; 4) N-terminal to the peptide epitope; or 5) C-terminal to the β2M polypeptide.

### PD-L1 Variants

[0275] As one non-limiting example, in some cases, a variant immunomodulatory polypeptide present in a TMMP of the present disclosure is a variant PD-L1 polypeptide. Wild-type PD-L1 binds to PD1.

[0276] A wild-type human PD-L1 polypeptide can comprise the following amino acid sequence:

(SEQ ID NO: 1)
MRIFAVFIFM TYWHLLNAFT VTVPKDLYVV EYGSNMTIEC
KFPVEKQLDL AALIVYWEME DKNIIQFVHG EEDLKVQHSS
YRQRARLLKD QLSLGNAALQ ITDVKLQDAG VYRCMISYGG
ADYKRITVKV NAPYNKINQR ILVVDPVTSE HELTCQAEGY
PKAEVIWTSS DHQVLSGKTT TTNSKREEKL FNVTSTLRIN
TTTNEIFYCT FRRLDPEENH TAELVIPGNI LNVSIKICLT
LSPST.

[0277] A wild-type human PD-L1 ectodomain can comprise the following amino acid sequence:

(SEQ ID NO: 2)
FT VTVPKDLYVV EYGSNMTIEC KFPVEKQLDL AALIVYWEME
DKNIIQFVHG EEDLKVQHSS YRQRARLLKD QLSLGNAALQ
ITDVKLQDAG VYRCMISYGG ADYKRITVKV NAPYNKINQR
ILVVDPVTSE HELTCQAEGY PKAEVIWTSS DHQVLSGKTT
TTNSKREEKL FNVTSTLRIN TTTNEIFYCT FRRLDPEENH
TAELVIPGNI LNVSIKI.

[0278] A wild-type PD-1 polypeptide can comprise the following amino acid sequence: PGWFLDSPDR PWNPPTFSPA LLVVTEGDNA TFTCSFSNTS ESFVLNWYRM SPSNQTDKLA AFPEDRSQPG QDCRFRVTQL PNGRDFHMSV VRARRNDSGT YLCGAISLAP KAQIKESLRA ELRVTERRAE VPTAHPSPSP RPAGQFQTLV VGVVGGLLGS LVLVWVLAV ICSRAARGTI GARRTGQPLK EDPSAVPVFS VDYGELDFQW REKTPEPPVP CVPEQTEYAT IVFPSGMGTS SPARRGSADG PRSAQPLRPE DGHCSWPL (SEQ ID NO:3). In some cases, where a TMMP of the present disclosure comprises a variant PD-L1 polypeptide, a “cognate co-immunomodulatory polypeptide” is a PD-1 polypeptide comprising the amino acid sequence of SEQ ID NO:3.

[0279] In some cases, a variant PD-L1 polypeptide exhibits reduced binding affinity to PD-1 (e.g., a PD-1 polypeptide comprising the amino acid sequence set forth in SEQ ID NO:3), compared to the binding affinity of a PD-L1 polypeptide comprising the amino acid sequence set forth in SEQ ID NO:1 or SEQ ID NO:2. For example, in some cases, a variant PD-L1 polypeptide of the present disclosure binds PD-1 (e.g., a PD-1 polypeptide comprising the amino acid sequence set forth in SEQ ID NO:3) with a binding affinity that is at least 10%, at least 15%, at least 20%, at least 25%, at least 30%, at least 35%, at least 40%, at least 45%, at least 50% less, at least 55% less, at least 60% less, at least 65% less, at least 70% less, at least 75% less, at least 80% less, at least 85% less, at least 90% less, at least 95% less, or more than 95% less, than the binding affinity of a PD-L1 polypeptide comprising the amino acid sequence set forth in SEQ ID NO:1 or SEQ ID NO:2.

[0280] In some cases, a variant PD-L1 polypeptide has a binding affinity to PD-1 that is from 1 nM to 1 mM. In some cases, a variant PD-L1 polypeptide of the present disclosure has a binding affinity to PD-1 that is from 100 nM to 100 μM. As another example, in some cases, a variant PD-L1 polypeptide has a binding affinity for PD1 (e.g., a PD1 polypeptide comprising the amino acid sequence set forth in SEQ ID NO:3) that is from about 100 nM to 150 nM, from about 150 nM to about 200 nM, from about 200 nM to about 250 nM, from about 250 nM to about 300 nM, from about 300 nM to about 350 nM, from about 350 nM to about 400 nM, from about 400 nM to about 500 nM, from about 500 nM to about 600 nM, from about 600 nM to about 700 nM, from about 700 nM to about 800 nM, from about 800 nM to about 900 nM, from about 900 nM to about 1 μM, to about 1 μM to about 5 μM, from about 5 μM to about 10 μM, from about 10 μM to about 15 μM, from about 15 μM to about 20 μM, from about 20 μM to about 25 μM, from about 25 μM to about 50 μM, from about 50 μM to about 75 μM, or from about 75 μM to about 100 μM.

[0281] In some cases, a variant PD-L1 polypeptide has a single amino acid substitution compared to the PD-L1 amino acid sequence set forth in SEQ ID NO:1 or SEQ ID NO:2. In some cases, a variant PD-L1 polypeptide has from 2 to 10 amino acid substitutions compared to the PD-L1 amino acid sequence set forth in SEQ ID NO: 1 or SEQ ID NO:2. In some cases, a variant PD-L1 polypeptide has 2 amino acid substitutions compared to the PD-L1 amino acid sequence set forth in SEQ ID NO:1 or SEQ ID NO:2. In some cases, a variant PD-L1 polypeptide has 3 amino acid substitutions compared to the PD-L1 amino acid sequence set forth in SEQ ID NO:1 or SEQ ID NO:2. In some cases, a variant PD-L1 polypeptide has 4 amino acid substitutions compared to the PD-L1 amino acid sequence set forth in SEQ ID NO:1 or SEQ ID NO:2. In some cases, a variant PD-L polypeptide has 5 amino acid substitutions compared to the PD-L1 amino acid sequence set forth in SEQ ID NO:1 or SEQ ID NO:2. In some cases, a variant PD-L1 polypeptide has 6 amino acid substitutions compared to the PD-L1 amino acid sequence set forth in SEQ ID NO: 1 or SEQ ID NO:2. In some cases, a variant PD-L1 polypeptide has 7 amino acid substitutions compared to the PD-L1 amino acid sequence set forth in SEQ ID NO: 1 or SEQ ID NO:2. In some cases, a variant PD-L1 polypeptide has 8 amino acid substitutions compared to the PD-L1 amino acid sequence set forth in SEQ ID NO: 1 or SEQ ID NO:2. In some cases, a variant PD-L1 polypeptide has 9 amino acid substitutions compared to the PD-L1 amino acid sequence set forth in SEQ ID NO:1 or SEQ ID NO:2. In some cases, a variant PD-L1 polypeptide has 10 amino acid substitutions compared to the PD-L1 amino acid sequence set forth in SEQ ID NO: 1 or SEQ ID NO:2.

[0282] A suitable PD-L1 variant includes a polypeptide that comprises an amino acid sequence having at least 90%, at least 95%, at least 98%, at least 99%, or 100%, amino acid sequence identity to the following amino acid sequence:

[0283] FT VTVPKXLYVV EYGSNMTIEC KFPVEKQLDL AALIVYWEME DKNIIQFVHG EEDLKVQHSS YRQRARLLKD QLSLGNAALQ ITDVKLQDAG VYRCMISYGG ADYKRITVKV NAPYNKINQR ILVVDPVTSE HELTCQAEGY PKAEVIWTSS DHQVLSGKTT TTNSKREEKL FNVTSTLRIN TTTNEIFYCT FRRLDPEENH TAELVIPGNI LNVSIKI (SEQ ID NO: 52), where X is any amino acid other than Asp. In some cases, X is Ala. In some cases, X is Arg.

[0284] A suitable PD-L1 variant includes a polypeptide that comprises an amino acid sequence having at least 90%, at least 95%, at least 98%, at least 99%, or 100%, amino acid sequence identity to the following amino acid sequence:

[0285] FT VTVPKDLYVV EYGSNMTIEC KFPVEKQLDL AALXVYWEME DKNIIQFVHG EEDLKVQHSS YRQRARLLKD QLSLGNAALQ ITDVKLQDAG VYRCMISYGG ADYKRITVKV NAPYNKINQR ILVVDPVTSE HELTCQAEGY PKAEVIWTSS DHQVLSGKTT TTNSKREEKL FNVTSTLRIN TTTNEIFYCT FRRLDPEENH TAELVIPGNI LNVSI (SEQ ID NO: 53), where X is any amino acid other than lie. In some cases, X is Asp.

[0286] A suitable PD-L1 variant includes a polypeptide that comprises an amino acid sequence having at least 90%, at least 95%, at least 98%, at least 99%, or 100%, amino acid sequence identity to the following amino acid sequence:

[0287] FT VTVPKDLYVV EYGSNMTIEC KFPVEKQLDL AALIVYWEME DKNIIQFVHG EXDLKVQHSS YRQRARLLKD QLSLGNAALQ ITDVKLQDAG VYRCMISYGG ADYKRITVKV NAPYNKINQR ILVVDPVTSE HELTCQAEGY PKAEVIWTSS DHQVLSGKTT TTNSKREEKL FNVTSTLRIN TTTNEIFYCT FRRLDPEENH TAELVIPGNI LNVSIKI (SEQ ID NO:54), where X is any amino acid other than Glu. In some cases, X is Arg.

### CD80 Variants

[0288] In some cases, a variant immunomodulatory polypeptide present in a TMMP of the present disclosure is a variant CD80 polypeptide. Wild-type CD80 binds to CD28. Wild-type CD80 also binds to CD86.

[0289] A wild-type amino acid sequence of the ectodomain of human CD80 can be as follows:

(SEQ ID NO: 4)
VIHVTK EVKEVATLSC GHNVSVEELA QTRIYWQKEK KMVLTMMSGD
MNIWPEYKNR TIFDITNNLS IVILALRPSD EGTYECVVLK
YEKDAFKREH LAEVTLSVKA DFPTPSISDF EIPTSNIRRI
ICSTSGGFPE PHLSWLENGE ELNAINTTVS QDPETELYAV
SSKLDFNMTT NHSFMCLIKY GHLRVNQTFN WNTTKQEHFP DN.

[0290] A wild-type CD28 amino acid sequence can be as follows: MLRLLLALNL FPSIQVTGNK ILVKQSPMLV AYDNAVNLSC KYSYNLFSRE FRASLHKGLD SAVEVCVVYG NYSQQLQVYS KTGFNCDGKL GNESVTFYLQ NLYVNQTDIY FCKIEVMYPP PYLDNEKSNG TIIHVKGKHL CPSPLFPGPS KPFWVLVVVG GVLACYSLLV TVAFIIFWVR SKRSRLLHSD YMNMTPRRPG PTRKHYQPYA PPRDFAAYRS (SEQ ID NO:5). In some cases, where a TMMP of the present disclosure comprises a variant CD80 polypeptide, a “cognate co-immunomodulatory polypeptide” is a CD28 polypeptide comprising the amino acid sequence of SEQ ID NO:5.

[0291] A wild-type CD28 amino acid sequence can be as follows: MLRLLLALNL FPSIQVTGNK ILVKQSPMLV AYDNAVNLSW KHLCPSPLFP GPSKPFWVLV VVGGVLACYS LLVTVAFIIF WVRSKRSRLL HSDYMNMTPR RPGPTRKHYQ PYAPPRDFAA YRS (SEQ ID NO:6)

[0292] A wild-type CD28 amino acid sequence can be as follows: MLRLLLALNL FPSIQVTGKH LCPSPLFPGP SKPFWVLVVV GGVLACYSLL VTVAFIIFWV RSKRSRLLHS DYMNMTPRRP GPTRKHYQPY APPRDFAAYR S (SEQ ID NO:7).

[0293] In some cases, a variant CD80 polypeptide exhibits reduced binding affinity to CD28, compared to the binding affinity of a CD80 polypeptide comprising the amino acid sequence set forth in SEQ ID NO:4 for CD28. For example, in some cases, a variant CD80 polypeptide binds CD28 with a binding affinity that is at least 10%, at least 15%, at least 20%, at least 25%, at least 30%, at least 35%, at least 40%, at least 45%, at least 50% less, at least 55% less, at least 60% less, at least 65% less, at least 70% less, at least 75% less, at least 80% less, at least 85% less, at least 90% less, at least 95% less, or more than 95% less, than the binding affinity of a CD80 polypeptide comprising the amino acid sequence set forth in SEQ ID NO:4 for CD28 (e.g., a CD28 polypeptide comprising the amino acid sequence set forth in one of SEQ ID NO:5, 6, or 7).

[0294] In some cases, a variant CD80 polypeptide has a binding affinity to CD28 that is from 100 nM to 100 μM. As another example, in some cases, a variant CD80 polypeptide of the present disclosure has a binding affinity for CD28 (e.g., a CD28 polypeptide comprising the amino acid sequence set forth in SEQ ID NO:5, SEQ ID NO:6, or SEQ ID NO:7) that is from about 100 nM to 150 nM, from about 150 nM to about 200 nM, from about 200 nM to about 250 nM, from about 250 nM to about 300 nM, from about 300 nM to about 350 nM, from about 350 nM to about 400 nM, from about 400 nM to about 500 nM, from about 500 nM to about 600 nM, from about 600 nM to about 700 nM, from about 700 nM to about 800 nM, from about 800 nM to about 900 nM, from about 900 nM to about 1 μM, to about 1 μM to about 5 μM, from about 5 μM to about 10 μM, from about 10 μM to about 15 μM, from about 15 μM to about 20 μM, from about 20 μM to about 25 μM, from about 25 μM to about 50 μM, from about 50 μM to about 75 μM, or from about 75 μM to about 100 μM.

[0295] In some cases, a variant CD80 polypeptide has a single amino acid substitution compared to the CD80 amino acid sequence set forth in SEQ ID NO:4. In some cases, a variant CD80 polypeptide has from 2 to 10 amino acid substitutions compared to the CD80 amino acid sequence set forth in SEQ ID NO:4. In some cases, a variant CD80 polypeptide has 2 amino acid substitutions compared to the CD80 amino acid sequence set forth in SEQ ID NO:4. In some cases, a variant CD80 polypeptide has 3 amino acid substitutions compared to the CD80 amino acid sequence set forth in SEQ ID NO:4. In some cases, a variant CD80 polypeptide has 4 amino acid substitutions compared to the CD80 amino acid sequence set forth in SEQ ID NO:4. In some cases, a variant CD80 polypeptide has 5 amino acid substitutions compared to the CD80 amino acid sequence set forth in SEQ ID NO:4. In some cases, a variant CD80 polypeptide has 6 amino acid substitutions compared to the CD80 amino acid sequence set forth in SEQ ID NO:4. In some cases, a variant CD80 polypeptide has 7 amino acid substitutions compared to the CD80 amino acid sequence set forth in SEQ ID NO:4. In some cases, a variant CD80 polypeptide has 8 amino acid substitutions compared to the CD80 amino acid sequence set forth in SEQ ID NO:4. In some cases, a variant CD80 polypeptide has 9 amino acid substitutions compared to the CD80 amino acid sequence set forth in SEQ ID NO:4. In some cases, a variant CD80 polypeptide has 10 amino acid substitutions compared to the CD80 amino acid sequence set forth in SEQ ID NO:4.

[0296] Suitable CD80 variants include a polypeptide that comprises an amino acid sequence having at least 90%, at least 95%, at least 98%, at least 99%, or 100%, amino acid sequence identity to any one of the following amino acid sequences:

[0297] VIIVTK EVKEVATLSC GIXVSVEELA QTRIYWQKEK KMVLTMMSGD MNIWPEYKNR TIFDITNNLS IVILALRPSD EGTYECVVLK YEKDAFKREH LAEVTLSVKA DFPTPSISDF EIPTSNIRRI ICSTSGGFPE PHLSWLENGE ELNAINTTVS QDPETELYAV SSKLDFNMTT NHSFMCLIKY GHLRVNQTFN WNTTKQEHFP DN (SEQ ID NO: 55), where X is any amino acid other than Asn. In some cases. X is Ala;

[0298] VIHVTK EVKEVATLSC GHXVSVEELA QTRIYWQKEK KMVLTMMSGD MNIWPEYKNR TIFDITXNLS IVILALRPSD EGTYECVVLK YEKDAFKREH LAEVTLSVKA DFPTPSISDF EIPTSNIRRI ICSTSGGFPE PHLSWLENGE ELNAINTTVS QDPETELYAV SSKLDFNMTT NHSFMCLIKY GHLRVNQTFN WNTTKQEHFP DN (SEQ ID NO: 56), where X is any amino acid other than Asn. In some cases, X is Ala;

[0299] VIHVTK EVKEVATLSC GHNVSVEELA QTRIYWQKEK KMVLTMMSGD MNIWPEYKNR TIFDITNNLS XVILALRPSD EGTYECVVLK YEKDAFKREH LAEVTLSVKA DFPTPSISDF EIPTSNIRRI ICSTSGGFPE PHLSWLENGE ELNAINTTVS QDPETELYAV SSKLDFNMTT NHSFMCLIKY GHLRVNQTFN WNTTKQEHFP DN (SEQ ID NO:57), where X is any amino acid other than Ile. In some cases, X is Ala;

[0300] VIHVTK EVKEVATLSC GHNVSVEELA QTRIYWQKEK KMVLTMMSGD MNIWPEYKNR TIFDITNNLS IVILALRPSD EGTYECVVLX YEKDAFKREH LAEVTLSVKA DFPTPSISDF EIPTSNIRRI ICSTSGGFPE PHLSWLENGE ELNAINTTVS QDPETELYAV SSKLDFNMTT NHSFMCLIKY GHLRVNQTFN WNTTKQEHFP DN (SEQ ID NO:58), where X is any amino acid other than Lys. In some cases, X is Ala;

[0301] VIHVTK EVKEVATLSC GHNVSVEELA QTRIYWQKEK KMVLTMMSGD MNIWPEYKNR TIFDITNNLS IVILALRPSD EGTYECVVLX YEKDAFKREH LAEVTLSVKA DFPTPSISDF EIPTSNIRRI ICSTSGGFPE PILSWLENGE ELNAINTTVS XDPETELYAV SSKLDFNMTT NHSFMCLIKY GHLRVNQTFN WNTTKQEHFP DN (SEQ ID NO:60), where X is any amino acid other than Gln. In some cases, X is Ala;

[0302] VIHVTK EVKEVATLSC GHNVSVEELA QTRIYWQKEK KMVLTMMSGD MNIWPEYKNR TIFDITNNLS IVILALRPSD EGTYECVVLK YEKDAFKREH LAEVTLSVKA DFPTPSISDF EIPTSNIRRI ICSTSGGFPE PHLSWLENGE ELNAINTTVS XDPETELYAV SSKILDFNMTT NHSFMCLIKY GHLRVNQTFN WNTTKQEHFP DN (SEQ ID NO:61), where X is any amino acid other than Asp. In some cases, X is Ala;

[0303] VIHVTK EVKEVATLSC GHNVSVEEXA QTRIYWQKEK KMVLTMMSGD MNIWPEYKNR TIFDITNNLS IVILALRPSD EGTYECVVLK YEKDAFKREH LAEVTLSVKA DFPTPSISDF EIPTSNIRRI ICSTSGGFPE PHLSWLENGE ELNAINTTVS QXPETELYAV SSKLDFNMTT NHSFMCLIKY GHLRVNQTFN WNTTKQEHFP DN (SEQ ID NO:62), where X is any amino acid other than Leu. In some cases, X is Ala;

[0304] VIHVTK EVKEVATLSC GHNVSVEEXA QTRIYWQKEK KMVLTMMSGD MNIWPEYKNR TIFDITNNLS IVILALRPSD EGTYECVVLK YEKDAFKREH LAEVTLSVKA DFPTPSISDF EIPTSNIRRI ICSTSGGFPE PHLSWLENGE ELNAINTTVS QDPETELYAV SSKLDFNMTT NHSFMCLIKY GHLRVNQTFN WNTTKQEHFP DN (SEQ ID NO:63), where X is any amino acid other than Tyr. In some cases, X is Ala;

[0305] VIHVTK EVKEVATLSC GHNVSVEELA QTRIYWXKEK KMVLTMMSGD MNIWPEYKNR TIFDITNNLS IVILALRPSD EGTYECVVLK YEKDAFKREH LAEVTLSVKA DFPTPSISDF EIPTSNIRRI ICSTSGGFPE PHLSWLENGE ELNAINTTVS QDPETELYAV SSKLDFNMTT NHSFMCLIKY GHLRVNQTFN WNTTKQEHFP DN (SEQ ID NO:64), where X is any amino acid other than Gin. In some cases, X is Ala;

[0306] VIHVTK EVKEVATLSC GHNVSVEELA QTRIYWQKEK KXVLTMMSGD MNIWPEYKNR TIFDITNNLS IVILALRPSD EGTYECVVLK YEKDAFKREH LAEVTLSVKA DFPTPSISDF EIPTSNIRRI ICSTSGGFPE PHLSWLENGE ELNAINTTVS QDPETELYAV SSKLDFNMTT NHSFMCLIKY GHLRVNQTFN WNTTKQEHFP DN (SEQ ID NO:65), where X is any amino acid other than Met. In some cases, X is Ala;

[0307] VIHVTK EVKEVATLSC GHNVSVEELA QTRIYWQKEK KMXLTMMSGD MNIWPEYKNR TIFDITNNLS IVILALRPSD EGTYECVVLK YEKDAFKREH LAEVTLSVKA DFPTPSISDF EIPTSNIRRI ICSTSGGFPE PHLSWLENGE ELNAINTTVS QDPETELYAV SSKLDFNMTT NHSFMCLIKY GHLRVNQTFN WNTTKQEHFP DN (SEQ ID NO:66), where X is any amino acid other than Val. In some cases, X is Ala;

[0308] VIHVTK EVKEVATLSC GHNVSVEELA QTRIYWQKEK KMVLTMMSGD MNXWPEYKNR TIFDITNNLS IVILALRPSD EGTYECVVLK YEKDAFKREH LAEVTLSVKA DFPTPSISDF EIPTSNIRRI ICSTSGGFPE PHLSWLENGE ELNAINTTVS QDPETELYAV SSKLDFNMTT NHSFMCLIKY GHLRVNQTFN WNTTKQEHFP DN (SEQ ID NO:67), where X is any amino acid other than Ile. In some cases, X is Ala;

[0309] VIHVTK EVKEVATLSC GHNVSVEELA QTRIYWQKEK KMVLTMMSGD MNIWPEXKNR TIFDITNNLS IVILALRPSD EGTYECVVLK YEKDAFKREH LAEVTLSVKA DFPTPSISDF EIPTSNIRRI ICSTSGGFPE PHLSWLENGE ELNAINTTVS QDPETELYAV SSKLDFNMTT NHSFMCLIKY GHLRVNQTFN WNTTKQEHFP DN (SEQ ID NO:68), where X is any amino acid other than Tyr. In some cases, X is Ala;

[0310] VIHVTK EVKEVATLSC GHNVSVEELA QTRIYWQKEK KMVLTMMSGD MNIWPEYKNR TIFXITNNLS IVILALRPSD EGTYECVVLK YEKDAFKREH LAEVTLSVKA DFPTPSISDF EIPTSNIRRI ICSTSGGFPE PHLSWLENGE ELNAINTTVS QDPETELYAV SSKLDFNMTT NHSFMCLIKY GHLRVNQTFN WNTTKQEHFP DN (SEQ ID NO:69), where X is any amino acid other than Asp. In some cases, X is Ala;

[0311] VIHVTK EVKEVATLSC GHNVSVEELA QTRTIYWQKEK KMVLTMMSGD MNIWPEYKNR TIFDITNNLS IVILALRPSD EGTYECVVLK YEKDAFKREH LAEVTLSVKA DXPTPSISDF EIPTSNIRRI ICSTSGGFPE PHLSWLENGE ELNAINTTVS QDPETELYAV SSKLDFNMTT NHSFMCLIKY GHLRVNQTFN WNTTKQEHFP DN (SEQ 1D NO:70), where X is any amino acid other than Phe. In some cases, X is Ala;

[0312] VIHVTK EVKEVATLSC GHNVSVEELA QTRIYWQKEK KMVLTMMSGD MNIWPEYKNR TIFDITNNLS IVILALRPSD EGTYECVVLK YEKDAFKREH LAEVTLSVKA DFPTPSISDF EIPTSNIRRI ICSTSGGFPE PHLSWLENGE ELNAINTTVX QDPETELYAV SSKLDFNMTT NHSFMCLIKY GHLRVNQTFN WNTTKQEHFP DN (SEQ ID NO:71), where X is any amino acid other than Ser. In some cases, X is Ala; and

[0313] VIHVTK EVKEVATLSC GHNVSVEELA QTRIYWQKEK KMVLTMMSGD MNIWPEYKNR TIFDITNNLS IVILALRPSD EGTYECVVLK YEKDAFKREH LAEVTLSVKA DFPTXSISDF EIPTSNIRRI ICSTSGGFPE PHLSWLENGE ELNAINTTVS QDPETELYAV SSKLDFNMTT NHSFMCLIKY GHLRVNQTFN WNTTKQEHFP DN (SEQ ID NO:72), where X is any amino acid other than Pro. In some cases, X is Ala.

### CD86 Variants

[0314] In some cases, a variant immunomodulatory polypeptide present in a TMMP of the present disclosure is a variant CD86 polypeptide. Wild-type CD86 binds to CD28. In some cases, where a TMMP of the present disclosure comprises a variant CD86 polypeptide, a “cognate co-immunomodulatory polypeptide” is a CD28 polypeptide comprising the amino acid sequence of SEQ ID NO:5.

[0315] The amino acid sequence of the full ectodomain of a wild-type human CD86 can be as follows:

(SEQ ID NO: 8)
APLKIQAYFNETADLPCQFANSQNQSLSELVVFWQDQENLVLNEVYLGKE
KFDSVHSKYMNRTSFDSDSWTLRLHNLQIKDKGLYQCIIHHKKPTGMIRI
HQMNSELSVLANFSQPEIVPISNITENVYINLICSSIHGYPEPKKMSVLL
RTKNSTIEYDGIMQKSQDNVTELYDVSISLSVSFPDVTSNMTIFCILETD
KTRLLSSPFSIELEDPQPPPDHIP.

[0316] The amino acid sequence of the IgV domain of a wild-type human CD86 can be as follows:

(SEQ ID NO: 9)
APLNIQAYFNETADLPOQFANSQNQSLSELVVFWQDQENLVLNEVYLGKE
KFDSVHSKYMNRISFDSDSWTLRLHNLQIKDKOLYQCIIHHKKPTOMIRI
HQMNSELSVL.

[0317] In some cases, a variant CD86 polypeptide exhibits reduced binding affinity to CD28, compared to the binding affinity of a CD86 polypeptide comprising the amino acid sequence set forth in SEQ ID NO:8 or SEQ ID NO:9 for CD28. For example, in some cases, a variant CD86 polypeptide binds CD28 with a binding affinity that is at least 10%, at least 15%, at least 20%, at least 25%, at least 30%, at least 35%, at least 40%, at least 45%, at least 50% less, at least 55% less, at least 60% less, at least 65% less, at least 70% less, at least 75% less, at least 80% less, at least 85% less, at least 90% less, at least 95% less, or more than 95% less, than the binding affinity of a CD86 polypeptide comprising the amino acid sequence set forth in SEQ ID NO:8 or SEQ ID NO:9 for CD28 (e.g., a CD28 polypeptide comprising the amino acid sequence set forth in one of SEQ ID NO:5, 6, or 7).

[0318] In some cases, a variant CD86 polypeptide has a binding affinity to CD28 that is from 100 nM to 100 μM. As another example, in some cases, a variant CD86 polypeptide of the present disclosure has a binding affinity for CD28 (e.g., a CD28 polypeptide comprising the amino acid sequence set forth in one of SEQ ID NOs:5, 6, or 7) that is from about 100 nM to 150 nM, from about 150 nM to about 200 nM, from about 200 nM to about 250 nM, from about 250 nM to about 300 nM, from about 300 nM to about 350 nM, from about 350 nM to about 400 nM, from about 400 nM to about 500 nM, from about 500 nM to about 600 nM, from about 600 nM to about 700 nM, from about 700 nM to about 800 nM, from about 800 nM to about 900 nM, from about 900 nM to about 1 μM, to about 1 μM to about 5 μM, from about 5 μM to about 10 μM, from about 10 μM to about 15 μM, from about 15 μM to about 20 μM, from about 20 μM to about 25 μM, from about 25 μM to about 50 μM, from about 50 μM to about 75 μM, or from about 75 μM to about 100 μM.

[0319] In some cases, a variant CD86 polypeptide has a single amino acid substitution compared to the CD86 amino acid sequence set forth in SEQ ID NO:8. In some cases, a variant CD86 polypeptide has from 2 to 10 amino acid substitutions compared to the CD86 amino acid sequence set forth in SEQ ID NO:8. In some cases, a variant CD86 polypeptide has 2 amino acid substitutions compared to the CD86 amino acid sequence set forth in SEQ ID NO:8. In some cases, a variant CD86 polypeptide has 3 amino acid substitutions compared to the CD86 amino acid sequence set forth in SEQ ID NO:8. In some cases, a variant CD86 polypeptide has 4 amino acid substitutions compared to the CD86 amino acid sequence set forth in SEQ ID NO:8. In some cases, a variant CD86 polypeptide has 5 amino acid substitutions compared to the CD86 amino acid sequence set forth in SEQ ID NO:8. In some cases, a variant CD86 polypeptide has 6 amino acid substitutions compared to the CD86 amino acid sequence set forth in SEQ ID NO:8. In some cases, a variant CD86 polypeptide has 7 amino acid substitutions compared to the CD86 amino acid sequence set forth in SEQ ID NO:8. In some cases, a variant CD86 polypeptide has 8 amino acid substitutions compared to the CD86 amino acid sequence set forth in SEQ ID NO:8. In some cases, a variant CD86 polypeptide has 9 amino acid substitutions compared to the CD86 amino acid sequence set forth in SEQ ID NO:8. In some cases, a variant CD86 polypeptide has 10 amino acid substitutions compared to the CD86 amino acid sequence set forth in SEQ ID NO:8.

[0320] In some cases, a variant CD86 polypeptide has a single amino acid substitution compared to the CD86 amino acid sequence set forth in SEQ ID NO:9. In some cases, a variant CD86 polypeptide has from 2 to 10 amino acid substitutions compared to the CD86 amino acid sequence set forth in SEQ ID NO:9. In some cases, a variant CD86 polypeptide has 2 amino acid substitutions compared to the CD86 amino acid sequence set forth in SEQ ID NO:9. In some cases, a variant CD86 polypeptide has 3 amino acid substitutions compared to the CD86 amino acid sequence set forth in SEQ ID NO:9. In some cases, a variant CD86 polypeptide has 4 amino acid substitutions compared to the CD86 amino acid sequence set forth in SEQ ID NO:9. In some cases, a variant CD86 polypeptide has 5 amino acid substitutions compared to the CD86 amino acid sequence set forth in SEQ ID NO:9. In some cases, a variant CD86 polypeptide has 6 amino acid substitutions compared to the CD86 amino acid sequence set forth in SEQ ID NO:9. In some cases, a variant CD86 polypeptide has 7 amino acid substitutions compared to the CD86 amino acid sequence set forth in SEQ ID NO:9. In some cases, a variant CD86 polypeptide has 8 amino acid substitutions compared to the CD86 amino acid sequence set forth in SEQ ID NO:9. In some cases, a variant CD86 polypeptide has 9 amino acid substitutions compared to the CD86 amino acid sequence set forth in SEQ ID NO:9. In some cases, a variant CD86 polypeptide has 10 amino acid substitutions compared to the CD86 amino acid sequence set forth in SEQ ID NO:9.

[0321] Suitable CD86 variants include a polypeptide that comprises an amino acid sequence having at least 90%, at least 95%, at least 98%, at least 99%, or 100%, amino acid sequence identity to any one of the following amino acid sequences:

[0322] APLKIQAYFNETADLPCQFANSQNQSLSELVVFWQDQENLVLNEVYGKEKFDSVHSKYM XRTSFDSDSWTLRLIHNLQIKDKGLYQCIIHHKKPTGMITRIHQMNSELSVLANFSQPEIVPISNITENVYI NLTCSSIHGYPEPKKMSVLLRTKNSTIEYDGIMQKSQDNVTELYDVSISLSVSFPDVTSNMTIFCILETD KTRLLSSPFSIELEDPQPPPDHIP (SEQ ID NO:73), where X is any amino acid other than Asn. In some cases, X is Ala;

[0323] APLKIQAYFNETADLPCQFANSQNQSLSELVVFWQDQENLVLNEVYLGKEKFDSVHSKYM NRTSFXSDSWTLRLHNLQIKDKGLYQCIIHHKKPTGMIRIHQMNSELSVLANFSQPEIVPISNITENVYI NLTCSSIHGYPEPKKMSVLLRTKNSTIEYDGIMQKSQDNVTELYDVSISLSVSFPDVTSNMTIFCILETD KTRLLSSPFSIELEDPQPPPDHIP (SEQ ID NO:74), where X is any amino acid other than Asp. In some cases, X is Ala;

[0324] APLKTQAYFNETADPCQFANSQNQSLSETLVVFWQDQENLVLNEVYGKEKFDSVHSKYM NRTSFDSDSXTLRLHNLQIKDKGLYQCIIHHKKPTGMIRIHQMNSELSVLANFSQPEIVPISNITENVYI NLTCSSIHGYPEPKKMSVLRTKNSTIEYDGIMQKSQDNVTELYDVSISLSVSFPDVTSNMTIFCILETD KTRLLSSPFSIELEDPQPPPDHIP (SEQ ID NO:75), where X is any amino acid other than Trp. In some cases, X is Ala;

[0325] APLKIQAYFNETADLPCQFANSQNQSLSELVVFWQDQENLVLNEVYLGKEKFDSVHSKYM NRTSFDSDSWTLRLHNLQIKDKGLYQCIIHXKKPTGMIRIHQMNSELSVLANFSQPEIVPISNITENVYI NLTCSSIHGYPEPKKMSVLLRTKNSTIEYDGIMQKSQDNVTELYDVSISLSVSFPDVTSNMTIFCILETD KTRLLSSPFSIELEDPQPPPDHIP (SEQ ID NO:76), where X is any amino acid other than His. In some cases, X is Ala;

[0326] APLKIQAYFNETADOLPCQFANSQNQSLSELVVFWQDQENLVLNEVYLGKEKFDSVHSKYM XRTSFDSDSWTLRLHNLQIKDKYQCIIHHKKPTGMIRIHQMNSELSVL (SEQ ID NO:77), where X is any amino acid other than Asn. In some cases, X is Ala;

[0327] APLKIQAYFNETADLPCQFANSQNQSLSELVVFWQDQENLVLNEVYLGKEKFDSVHSKYM NRTSFXSDSWTLRLHNLQIKDKGLYQCIIIIHKKPTGMIRIIQMNSELSVL (SEQ ID NO:78), where X is any amino acid other than Asp. In some cases, X is Ala;

[0328] APLKIQAYFNETADLPCQFANSQNQSLSELVVFWQDQENLVLNEVYLGKEKFDSVHSKYM NRTSFDSDSXTLRLHNLQIKDKGLYQCIIHHKKPTGMIRIHQMNSELSVL (SEQ ID NO:79), where X is any amino acid other than Trp. In some cases, X is Ala;

[0329] APLKIQAYFNETADLPCQFANSQNQSLSELVVFWQDQENLVLNEVYLGKEKFDSVHSKYM NRTSFDSDSWTLRLHNLQIKDKGLYQCIIHXKKPTGMIRIHQMNSELSVL (SEQ ID NO:80), where X is any amino acid other than His. In some cases, X is Ala;

[0330] APLKIQAYFNETADLPCQFANSQNQSLSELVVFWQDQENLXLNEVYLGKEKFDSVHSKYM NRTSFDSDSWTLRLHNLQIKDKCLYQCIIHHKKPTGMIRIHQMNSELSVLANFSQPEIVPISNITENVYI NLTCSSTHGYPEPKKMSVLLRTKNSTIEYDGIMQKSQDNVTELYDVSISLSVSFPDVTSNMTIFCILETD KTRLLSSPFSIELEDPQPPPDHIP (SEQ ID NO:81), where X is any amino acid other than Val. In some cases, X is Ala;

[0331] APLKIQAYFNETADLPCQFANSQNQSLSELVVFWQDQENLXLNEVYLGKEKFDSVHSKYM NRTSFDSDSWTLRLIINLQIKDKGLYQCIIHIHKKPTGMIRIHQMNSELSVL (SEQ ID NO:82), where X is any amino acid other than Val. In some cases, X is Ala;

[0332] APLKIQAYFNETADLPCQFANSQNQSLSELVVFWXDQENLVLNEVYLGKEKFDSVHSKYM NRTSFDSDSWTLRLHNLQIKDKGLYQCIIHHKKPTGMIRIHQMNSELSVLANFSQPEIVPISNITENVYI NLTCSSIHGYPEPKKMSVLLRTKNSTIEYDGIMQKSQDNVTELYDVSISLSVSFPDVTSNMTIFCILETD KTRLLSSPFSIELEDPQPPPDHIP (SEQ ID NO:83), where X is any amino acid other than Gln. In some cases, X is Ala;

[0333] APLKIQAYFNETADLPCQFANSQNQSLSELVVFWXDQENLVLNEVYLCKEKFDSVHSKYM NRTSFDSDSWTLRLHNLQIKDKGLYQCIIHHKKPTGMIRIHQMNSELSVL (SEQ ID NO:84), where X is any amino acid other than Gln. In some cases, X is Ala;

[0334] APLKIQAYFNETADLPCQFANSQNQSLSELVVXWQDQENLVLNEVYLGKEKFDSVHSKYM NRTSFDSDSWTLRLHNLQIKDKGLYQCIIHHKKPTGMIRIHQMNSELSVLANFSQPEIVPISNITENVYI NLTCSSIHGYPEPKKMSVLLRTKNSTIEYDGIMQKSQDNVTELYDVSISLSVSFPDVTSNMTIFCILETD KTRLLSSPFSIELEDPQPPPDHIP (SEQ ID NO:85), where X is any amino acid other than Phe. In some cases, X is Ala;

[0335] APLKIQAYFNETADLPCQFANSQNQSLSELVVXWQDQENLVLNEVYLGKEKFDSVHSKYM NRTSFDSDSWTLRLHNLQIKDKGYQCIIHHKKPTGMIRIHQMNSELSVL (SEQ ID NO:86), where X is any amino acid other than Phe. In some cases, X is Ala;

[0336] APLKIQAYFNETADLPCQFANSQNQSLSELVVFWQDQENLVLNEVYLGKEKFDSVHSKYM NRTSFDSDSWTXRLHNLQIKDKGIYQCIIHHKKPTGMIRIHQMNSELSVLANFSQPEIVPISNITENVYI NLTCSSIHGYPEPKKMSVLLRTKNSTIEYDGIMQKSQDNVTELYDVSISLSVSFPDVTSNMTIFCILETD KTRLLSSPFSIELEDPQPPPDHIP (SEQ ID NO:87), where X is any amino acid other than Leu. In some cases, X is Ala;

[0337] APLKIQAYFNETADLPCQFANSQNQSLSELVVFWQDQENLVLNEVYLGKEKFDSVIISKYM NRTSFDSDSWTX̅RLHNLQIKDKGLYQCIIHHKKPTGMIRIHQMNSELSVL (SEQ ID NO:88), where X is any amino acid other than Leu. In some cases. X is Ala;

[0338] APLKIQAYFNETADLPCQFANSQNQSLSELVVFWQDQENLVLNEVYLGKEKFDSVHSKXM NRTSFDSDSWTLRLHNLQIKDKGLYQCIIHHKKPTGMIRIHQMNSELSVLANFSQPEIVPISNITENVYI NLTCSSIHGYPEPKKMSVLLRTKNSTIEYDGIMQKSQDNVTELYDVSISLSVSFPDVTSNMTIFCILETD KTRLLSSPFSIELEDPQPPPDHIP (SEQ ID NO:89), where X is any amino acid other than Tyr. In some cases, X is Ala;

[0339] APLKIQAYFNETADLPCQFANSQNQSLSELVVFWQDQENLVLNEVYLGKEKFDSVHSKXM NRTSFDSDSWTLRLHNLQIKDKGLYQCIIHHKKPTGMIRIHQMNSELSVL (SEQ ID NO:90), where X is any amino acid other than Tyr. In some cases, X is Ala;

[0340] APLKIQAYFNETADLPCQFANSQNQSLSELVVFWQDQENLVLNEVYLGKEKFDSVHSKYM X̅RTSFDSDSWTLRLHNLQIKDKGLYQCIIHXKKPTGMIRIHQMNSELSVLANFSQPEIVPISNITENVYI NLTCSSIHGYPEPKKMSVLLRTKNSTIEYDGIMQKSQDNVTELYDVSISLSVSFPDVTSNMTIFCILETD KTRLLSSPFSIELEDPQPPPDHIP (SEQ ID NO:91), where the first X is any amino acid other than Asn and the second X is any amino acid other than His. In some cases, the first and the second X are both Ala;

[0341] APLKIQAYFNETADLPCQFANSQNQSLSELVVFWQDQENLVLNEVYLGKEKFDSVHSKYM X̅RTSFDSDSWTLRLINLQIKDKGLYQCIIIIXKKPTCMIRIIIQMNSELSVL (SEQ ID NO:92), where the first X is any amino acid other than Asn and the second X is any amino acid other than His. In some cases, the first and the second X are both Ala;

[0342] APLKIQAYFNETADLPCQFANSQNQSLSELVVFWQDQENLVLNEVYLGKEKFDSVHSKYM NRTSFX₁SDSWTLRLHNLQIKDKGLYQCIIHX₂KKPTGMIRIHQMNSELSVLANFSQPEIVPISNITENVY INLTCSSIHGYPEPKKMSVLLRTKNSTIEYDGIMQKSQDNVTELYDVSISLSVSFPDVTSNMTIFCILET DKTRLLSSPFSIELEDPQPPPDHIP (SEQ ID NO:93), where X₁ is any amino acid other than Asp, and X₂ is any amino acid other than His. In some cases, X₁ is Ala and X₂ is Ala;

[0343] APLKIQAYFNETADLPCQFANSQNQSLSELVVFWQDQENLVLNEVYLGKEKFDSVHSKYM NRTSFX₁SDSWTLRLHNLQTKDKGLYQCTIHX₂KKPTGMIRTHQMNSELSVL (SEQ ID NO:94), where the first X is any amino acid other than Asn and the second X is any amino acid other than His. In some cases, the first and the second X are both Ala;

[0344] APLKIQAYFNETADLPCQFANSQNQSLSELVVFWQDQENLVLNEVYGKEKFDSVHSKYM X₁RTSFX₂SDSWTLRHNLQIKDKGLYQCIIHX₃KKPTGMIRIHQMNSELSVLANFSQPEIVPISNITENV YINLTCSSIHGYPEPKKMSVLLRTKNSTIEYDGIMQKSQDNVTELYDVSTSLSVSFPDVTSNMTIFCTE TDKTRLLSSPFSIELEDPQPPPDHIP (SEQ ID NO:95), where X₁ is any amino acid other than Asn, X₂ is any amino acid other than Asp, and X₃ is any amino acid other than His. In some cases, X₁ is Ala, X₂ is Ala, and X₃ is Ala; and

[0345] APLKIQAYFNETADLPCQFANSQNQSLSELVVFWQDQENLVLNEVYIGKEKFDSVHSKYM X₁RTSFX₂SDSWTLRHNLQIKDKGLYQCIIHX₃KKPTGMIRIHQMNSELSVL (SEQ ID NO:96), where X₁ is any amino acid other than Asn, X₂ is any amino acid other than Asp, and X₃ is any amino acid other than His. In some cases, X₁ is Ala, X₂ is Ala, and X₃ is Ala.

### 4-1BBL Variants

[0346] In some cases, a variant immunomodulatory polypeptide present in a TMMP of the present disclosure is a variant 4-1 BBL polypeptide. Wild-type 4-1BBL binds to 4-1 BB (CD137).

[0347] A wild-type 4-1BBL amino acid sequence can be as follows:

(SEQ ID NO: 10)
MEYASDASLD PEAPWPPAPR ARACRVLPWA LVAGLLLLLL
LAAACAVFLA CPWAVSGARA SPGSAASPRL REGPELSPDD
PAGLLDLRQG MFAQLVAQNV LLIDGPLSWY SDPGLAGVSL
TGGLSYKEDT KELVVAKAGV YYVFEQLELR RVVAGEGSGS
VSLALHLQPL RSAAGAAALA LTVDLPPASS EARNSAFGFQ
GRLLHLSAGQ RLGVHLHTEA RARHAWQLTQ GATVLGLFRV
TPEIPAGLPS PRSE.

[0348] In some cases, a variant 4-1BBL polypeptide is a variant of the tumor necrosis factor (TNF) homology domain (THD) of human 4-1BBL.

[0349] A wild-type amino acid sequence of the THD of human 4-1BBL can be, e.g., one of SEQ ID NOs:11-13, as follows:

(SEQ ID NO: 11)
PAGLLDLRQG MFAQLVAQNV LLIDGPLSWY SDPGLAGVSL
TGGLSYKEDT KELVVAKAGV YYVFFQLELR RVVAGEGSGS
VSLALHLQPL RSAAGAAALA LTVDLPPASS EARNSAFGFQ
GRLLHLSAGQ RLGVHLHTEA RARHAWQLTQ GATVLGLFRV
TPEIPAGLPS PRSE.
(SEQ ID NO: 12)
D PAGLLDLRQG MFAQLVAQNV LLIDGPLSWY SDPGLAGVSL
TGGLSYKEDT KELVVAKAGV YYVFFQLELR RVVAGEGSGS
VSLALHLQPL RSAAGAAALA LTVDLPPASS EARNSAFGFQ
GRLLHLSAGQ RLGVHLHTEA RARHAWQLTQ GATVLGLFRV
TPEIPAGLPS PRSE.
(SEQ ID NO:13)
D PAGLLDLRQG MFAQLVAQNV LLIDGPLSWY SDPGLAGVSL
TGGLSYKEDT KELVVAKAGV YYVFFQLELR RVVAGEGSGS
VSLALHLQPL RSAAGAAALA LTVDLPPASS EARNSAFGFQ
GRLLHLSAGQ RLGVHLHTEA RARHAWQLTQ GATVLGLFRV
TPEIPA.

[0350] A wild-type 4-1BB amino acid sequence can be as follows: MGNSCYNIVA TLLLVLNFER TRSLQDPCSN CPAGTFCDNN RNQICSPCPP NSFSSAGGQR TCDICRQCKG VFRTRKECSS TSNAECDCTP GFHCLGAGCS MCEQDCKQGQ ELTKKGCKDC CFGTFNDQKR GICRPWTNCS LDGKSVLVNG TKERDVVCGP SPADLSPGAS SVTPPAPARE PGHSPQIISF FLALTSTALL FLLFFLTLRF SVVKRGRKKL LYIFKQPFMR PVQTTQEEDG CSCRFPEEEE GGCEL (SEQ ID NO:14). In some cases, where a TMMP of the present disclosure comprises a variant 4-1BBL polypeptide, a “cognate co-immunomodulatory polypeptide” is a 4-1BB polypeptide comprising the amino acid sequence of SEQ ID NO:14.

[0351] In some cases, a variant 4-1BBL polypeptide exhibits reduced binding affinity to 4-1 BB, compared to the binding affinity of a 4-1BBL polypeptide comprising the amino acid sequence set forth in one of SEQ ID NOs:10-13. For example, in some cases, a variant 4-1BBL polypeptide of the present disclosure binds 4-1BB with a binding affinity that is at least 10% less, at least 15% less, at least 20% less, at least 25%, at least 30% less, at least 35% less, at least 40% less, at least 45% less, at least 50% less, at least 55% less, at least 60% less, at least 65% less, at least 70% less, at least 75% less, at least 80% less, at least 85% less, at least 90% less, at least 95% less, or more than 95% less, than the binding affinity of a 4-1BBL polypeptide comprising the amino acid sequence set forth in one of SEQ ID NOs:10-13 for a 4-1BB polypeptide (e.g., a 4-1BB polypeptide comprising the amino acid sequence set forth in SEQ ID NO:14), when assayed under the same conditions.

[0352] In some cases, a variant 4-1BBL polypeptide has a binding affinity to 4-1BB that is from 100 nM to 100 μM. As another example, in some cases, a variant 4-1 BBL polypeptide has a binding affinity for 4-1BB (e.g., a 4-1BB polypeptide comprising the amino acid sequence set forth in SEQ ID NO:14) that is from about 100 nM to 150 nM, from about 150 nM to about 200 nM, from about 200 nM to about 250 nM, from about 250 nM to about 300 nM, from about 300 nM to about 350 nM, from about 350 nM to about 400 nM, from about 400 nM to about 500 nM, from about 500 nM to about 600 nM, from about 600 nM to about 700 nM, from about 700 nM to about 800 nM, from about 800 nM to about 900 nM, from about 900 nM to about 1 μM, to about 1 μM to about 5 μM, from about 5 μM to about 10 μM, from about 10 μM to about 15 μM, from about 15 μM to about 20 μM, from about 20 μM to about 25 μM, from about 25 μM to about 50 μM, from about 50 μM to about 75 μM, or from about 75 μM to about 100 μM.

[0353] In some cases, a variant 4-1 BBL polypeptide has a single amino acid substitution compared to the 4-1BBL amino acid sequence set forth in one of SEQ ID NOs:10-13. In some cases, a variant 4-1BBL polypeptide has from 2 to 10 amino acid substitutions compared to the 4-1BBL amino acid sequence set forth in one of SEQ ID NOs:10-13. In some cases, a variant 4-1BBL polypeptide has 2 amino acid substitutions compared to the 4-1 BBL amino acid sequence set forth in one of SEQ ID NOs:10-13. In some cases, a variant 4-1BBL polypeptide has 3 amino acid substitutions compared to the 4-1BBL amino acid sequence set forth in one of SEQ ID NOs:10-13. In some cases, a variant 4-1BBL polypeptide has 4 amino acid substitutions compared to the 4-1BBL amino acid sequence set forth in one of SEQ ID NOs:10-13. In some cases, a variant 4-1BBL polypeptide has 5 amino acid substitutions compared to the 4-1BBL amino acid sequence set forth in one of SEQ ID NOs:10-13. In some cases, a variant 4-1 BBL polypeptide has 6 amino acid substitutions compared to the 4-1 BBL amino acid sequence set forth in one of SEQ ID NOs:10-13. In some cases, a variant 4-1BBL polypeptide has 7 amino acid substitutions compared to the 4-1BBL amino acid sequence set forth in one of SEQ ID NOs:10-13. In some cases, a variant 4-1 BBL polypeptide has 8 amino acid substitutions compared to the 4-1BBL amino acid sequence set forth in one of SEQ ID NOs:10-13. In some cases, a variant 4-1BBL polypeptide has 9 amino acid substitutions compared to the 4-1BBL amino acid sequence set forth in one of SEQ ID NOs:10-13. In some cases, a variant 4-1BBL polypeptide has 10 amino acid substitutions compared to the 4-11BBL amino acid sequence set forth in one of SEQ ID NOs:10-13.

[0354] Suitable 4-1BBL variants include a polypeptide that comprises an amino acid sequence having at least 90%, at least 95%, at least 98%, at least 99%, or 100%, amino acid sequence identity to any one of the following amino acid sequences:

[0355] PAGLLDLRQG MFAQLVAQNV LLIDGPLSWY SDPGLAGVSL TGGLSYXEDT KELVVAKAGV YYVFFQLELR RVVAGEGSGS VSLALHLQPL RSAAGAAALA LTVDLPPASS EARNSAFGFQ GRLLHLSAGQ RLGVHLHTEA RARHAWQLTQ GATVLGLFRV TPEIPAGLPS PRSE (SEQ ID NO: 97), where X is any amino acid other than Lys. In some cases, X is Ala;

[0356] PAGLLDLRQG MFAQLVAQNV LLIDGPLSWY SDPGLAGVSL TGGLSYKEDT KELVVAKAGV YYVFFQLELR RVVAGEGSGS VSLALHLQPL RSAAGAAALA LTVDLPPASS EARNSAFGFQ GRLLHLSAGQ RLGVHLHTEA RARHAWXLTQ GATVLGLFRV TPEIPAGLPS PRSE (SEQ ID NO: 98), where X is any amino acid other than Gln. In some cases, X is Ala;

[0357] PAGLLDLRQG XFAQLVAQNV LLIDGPLSWY SDPGLAGVSL TGGLSYKEDT KELVVAKAGV YYVFFQLELR RVVAGEGSGS VSLALHLQPL RSAAGAAALA LTVDLPPASS EARNSAFGFQ GRLLHLSAGQ RLGVHLHTEA RARHAWQLTQ GATVLGLFRV TPEIPAGLPS PRSE (SEQ ID NO: 99), where X is any amino acid other than Met. In some cases, X is Ala;

[0358] PAGLLDLRQG MX̅AQLVAQNV LLIDGPLSWY SDPGLAGVSL TGGLSYKEDT KELVVAKAGV YYVFFQLELR RVVAGEGSGS VSLALHLQPL RSAAGAAALA LTVDLPPASS EARNSAFGFQ GRLLHLSAGQ RLGVHLHTEA RARHAWQLTQ GATVLGLFRV TPEIPAGLPS PRSE (SEQ ID NO: 100), where X is any amino acid other than Phe. In some cases, X is Ala;

[0359] PAGLLDLRQG MFAXLVAQNV LLIDGPLSWY SDPGLAGVSL TGGLSYKEDT KELVVAKAGV YYVFFQLELR RVVAGEGSGS VSLALHLQPL RSAAGAAALA LTVDLPPASS EARNSAFGFQ GRLLHLSAGQ RLGVHLHTEA RARHAWQLTQ GATVLGLFRV TPEIPAGLPS PRSE (SEQ ID NO:101), where X is any amino acid other than Gln. In some cases, X is Ala;

[0360] PAGLLDLRQG MFAQXVAQNV LLTDGPLSWY SDPGLAGVSL TGGLSYKEDT KELVVAKAGV YYVFFQLELR RVVAGEGSGS VSLALHLQPL RSAAGAAALA LTVDLPPASS EARNSAFGFQ GRLLHLSAGQ RLGVHLHTEA RARHAWQLTQ GATVLGLFRV TPEIPAGLPS PRSE (SEQ ID NO:102), where X is any amino acid other than Leu. In some cases, X is Ala;

[0361] PAGLLDLRQG MFAQLXAQNV LLIDGPLSWY SDPGLAGVSL TGGLSYKEDT KELVVAKAGV YYVFFQLELR RVVAGEGSGS VSLALHLQPL RSAAGAAALA LTVDLPPASS EARNSAFGFQ GRLLHLSAGQ RLGVHLHTEA RARHAWQLTQ GATVLGLFRV TPEIPAGLPS PRSE (SEQ ID NO:103), where X is any amino acid other than Val. In some cases, X is Ala;

[0362] PAGLLDLRQG MFAQLVAXNV LLIDGPLSWY SDPGLAGVSL TGGLSYKEDT KELVVAKAGV YYVFFQLELR RVVAGEGSGS VSLALHLQPL RSAAGAAALA LTVDLPPASS EARNSAFGFQ GRLLHLSAGQ RLGVHLHTEA RARHAWQLTQ GATVLGLFRV TPEIPAGLPS PRSE (SEQ ID NO:104), where X is any amino acid other than Gln. In some cases, X is Ala;

[0363] PAGLLDLRQG MFAQLVAQXV LLIDGPLSWY SDPGLAGVSL TGGLSYKEDT KELVVAKAGV YYVFFQLELR RVVAGEGSGS VSLALHLQPL RSAAGAAALA LTVDLPPASS EARNSAFGFQ GRLLHLSAGQ RLGVHLHTEA RARHAWQLTQ GATVLGLFRV TPEIPAGLPS PRSE (SEQ ID NO:105), where X is any amino acid other than Asn. In some cases, X is Ala;

[0364] PAGLLDLRQG MFAQLVAQNX LLIDGPLSWY SDPGLAGVSL TGGLSYKEDT KELVVAKAGV YYVFFQLELR RVVAGEGSGS VSLALHLQPL RSAAGAAALA LTVDLPPASS EARNSAFGFQ GRLLHLSAGQ RLGVHLHTEA RARHAWQLTQ GATVLGLFRV TPEIPAGLPS PRSE (SEQ ID NO:106), where X is any amino acid other than Val. In some cases. X is Ala;

[0365] PAGLLDILRQG MFAQLVAQNV XLIDGPLSWY SDPGLAGVSL TGGLSYKEDT KELVVAKAGV YYVFFQLELR RVVAGEGSGS VSLALHLQPL RSAAGAAALA LTVDLPPASS EARNSAFGFQ GRLLHLSAGQ RLGVHLHTEA RARHAWQLTQ GATVLGLFRV TPEIPAGLPS PRSE (SEQ ID NO: 107), where X is any amino acid other than Leu. In some cases, X is Ala;

[0366] PAGLLDLRQG MFAQLVAQNV LXIDGPLSWY SDPGLAGVSL TGGLSYKEDT KELVVAKAGV YYVFFQLELR RVVAGEGSGS VSLALHLQPL RSAAGAAALA LTVDLPPASS EARNSAFGFQ GRLLHLSAGQ RLGVHLHTEA RARHAWQLTQ GATVLGLFRV TPEIPAGLPS PRSE (SEQ ID NO:108), where X is any amino acid other than Leu. In some cases, X is Ala;

[0367] PAGLLDLRQG MFAQLVAQNV LLXDGPLSWY SDPGLAGVSL TGGLSYKEDT KELVVAKAGV YYVFFQLELR RVVAGEGSGS VSLALHLQPL RSAAGAAALA LTVDLPPASS EARNSAFGFQ GRLLHLSAGQ RLGVHLHTEA RARHAWQLTQ GATVLGLFRV TPEIPAGLPS PRSE (SEQ ID NO:109), where X is any amino acid other than lie. In some cases, X is Ala;

[0368] PAGLLDLRQG MFAQLVAQNV LLIXGPLSWY SDPGLAGVSL TGGLSYKEDT KELVVAKAGV YYVFFQLELR RVVAGEGSGS VSLALHLQPL RSAAGAAALA LTVDLPPASS EARNSAFGFQ GRLLHLSAGQ RLGVHLHTEA RARHAWQLTQ GATVLGLFRV TPEIPAGLPS PRSE (SEQ ID NO: 110), where X is any amino acid other than Asp. In some cases, X is Ala;

[0369] PAGLLDLRQG MFAQLVAQNV LLIDXPLSWY SDPGLAGVSL TGGLSYKEDT KELVVAKAGV YYVFFQLELR RVVAGEGSGS VSLALHLQPL RSAAGAAALA LTVDLPPASS EARNSAFGFQ GRLLHLSAGQ RLGVHLHTEA RARHAWQLTQ GATVLGLFRV TPEIPAGLPS PRSE (SEQ ID NO:111), where X is any amino acid other than Gly. In some cases, X is Ala;

[0370] PAGLLDLRQG MFAQLVAQNV LLIGGXLSWY SDPGLAGVSL TGGLSYKEDT KELVVAKAGV YYVFFQLELR RVVAGEGSGS VSLALHLQPL RSAAGAAALA LTVDLPPASS EARNSAFGFQ GRLLHLSAGQ RLGVHLHTEA RARHAWQLTQ GATVLGLFRV TPEIPAGLPS PRSE (SEQ ID NO: 112), where X is any amino acid other than Pro. In some cases, X is Ala;

[0371] PAGLLDLRQG MFAQLVAQNV LLIGGXLSWY SDPGLAGVSL TGGLSYKEDT KELVVAKAGV YYVFFQLELR RVVAGEGSGS VSLALHLQPL RSAAGAAALA LTVDLPPASS EARNSAFGFQ GRLLHLSAGQ RLGVHLHTEA RARHAWQLTQ GATVLGLFRV TPEIPAGLPS PRSE (SEQ ID NO:113), where X is any amino acid other than Leu. In some cases, X is Ala;

[0372] PAGLLDLRQG MFAQLVAQNV LLIGGPLXWY SDPGLAGVSL TGGLSYKEDT KELVVAKAGV YYVFFQLELR RVVAGEGSGS VSLALHLQPL RSAAGAAALA LTVDLPPASS EARNSAFGFQ GRLLHLSAGQ RLGVHLHTEA RARHAWQLTQ GATVLGLFRV TPEIPAGLPS PRSE (SEQ ID NO: 114), where X is any amino acid other than Ser. In some cases, X is Ala;

[0373] PAGLLDLRQG MFAQLVAQNV LLIGGPLSXY SDPGLAGVSL TGGLSYKEDT KELVVAKAGV YYVFFQLELR RVVAGEGSGS VSLALHLQPL RSAAGAAALA LTVDLPPASS EARNSAFGFQ GRLLHLSAGQ RLGVHLHTEA RARHAWQLTQ GATVLGLFRV TPEIPAGLPS PRSE (SEQ ID NO:115), where X is any amino acid other than Trp. In some cases, X is Ala;

[0374] PAGLLDLRQG MFAQLVAQNV LLIGGPLSWX SDPGLAGVSL TGGLSYKEDT KELVVAKAGV YYVFFQLELR RVVAGEGSGS VSLALHLQPL RSAAGAAALA LTVDLPPASS EARNSAFGFQ GRLLHLSAGQ RLGVHLHTEA RARKAWQLTQ GATVLGLFRV TPEIPAGLPS PRSE (SEQ ID NO: 116), where X is any amino acid other than Tyr. In some cases, X is Ala;

[0375] PAGLLDLRQG MFAQLVAQNV LLIGGPLSWY XDPGLAGVSL TGGLSYKEDT KELVVAKAGV YYVFFQLELR RVVAGEGSGS VSLALHLQPL RSAAGAAALA LTVDLPPASS EARNSAFGFQ GRLLHLSAGQ RLGVHLHTEA RARHAWQLTQ GATVLGLFRV TPEIPAGLPS PRSE (SEQ ID NO: 117), where X is any amino acid other than Ser. In some cases, X is Ala;

[0376] PAGLLDLRQG MFAQLVAQNV LLIGGPLSWY SXPGLAGVSL TGGLSYKEDT KELVVAKAGV YYVFFQLELR RVVAGEGSGS VSLALHLQPL RSAAGAAALA LTVDLPPASS EARNSAFGFQ GRLLHLSAGQ RLGVHLHTEA RARHAWQLTQ GATVLGLFRV TPEIPAGLPS PRSE (SEQ ID NO:118), where X is any amino acid other than Asp. In some cases, X is Ala;

[0377] PAGLLDLRQG MFAQLVAQNV LLIGGPLSWY SDXGLAGVSL TGGLSYKEDT KELVVAKAGV YYVFFQLELR RVVAGEGSGS VSLALHLQPL RSAAGAAALA LTVDLPPASS EARNSAFGFQ GRLLHLSAGQ RLGVHLHTEA RARHAWQLTQ GATVLGLFRV TPEIPAGLPS PRSE (SEQ ID NO: 119), where X is any amino acid other than Pro. In some cases, X is Ala;

[0378] PAGLLDLRQG MFAQLVAQNV LLIGGPLSWY SDPXLAGVSL TGGLSYKEDT KELVVAKAGV YYVFFQLELR RVVAGEGSGS VSLALHLQPL RSAAGAAALA LTVDLPPASS EARNSAFGFQ GRLLHLSAGQ RLGVHLHTEA RARHAWQLTQ GATVLGLFRV TPEIPAGLPS PRSE (SEQ ID NO:120), where X is any amino acid other than Gly. In some cases, X is Ala;

[0379] PAGLLDLRQG MFAQLVAQNV LLIGGPLSWY SDPGXAGVSL TGGLSYKEDT KELVVAKAGV YYVFFQLELR RVVAGEGSGS VSLALHLQPL RSAAGAAALA LTVDLPPASS EARNSAFGFQ GRLLHLSAGQ RLGVHLHTEA RARHAWQLTQ GATVLGLFRV TPEIPAGLPS PRSE (SEQ ID NO:121), where X is any amino acid other than Leu. In some cases, X is Ala;

[0380] PAGLLDLRQG MFAQLVAQNV LLIGGPLSWY SDPGLAXVSL TGGLSYKEDT KELVVAKAGV YYVFFQLELR RVVAGEGSGS VSLALHLQPL RSAAGAAALA LTVDLPPASS EARNSAFGFQ GRLLHLSAGQ RLGVHLHTEA RARHAWQLTQ GATVLGLFRV TPEIPAGLPS PRSE (SEQ ID NO:122), where X is any amino acid other than Gly. In some cases, X is Ala;

[0381] PAGLLDLRQG MFAQLVAQNV LLIGGPLSWY SDPGLAGXSL TGGLSYKEDT KELVVAKAGV YYVFFQLELR RVVAGEGSGS VSLALHLQPL RSAAGAAALA LTVDLPPASS EARNSAFGFQ GRLLHLSAGQ RLGVHLHTEA RARHAWQLTQ GATVLGLFRV TPEIPAGLPS PRSE (SEQ ID NO: 123), where X is any amino acid other than Val. In some cases, X is Ala;

[0382] PAGLLDLRQG MFAQLVAQNV LLIGGPLSWY SDPGLAGVXL TGGLSYKEDT KELVVAKAGV YYVFFQLELR RVVAGEGSGS VSLALHLQPL RSAAGAAALA LTVDLPPASS EARNSAFGFQ GRLLHLSAGQ RLGVHLHTEA RARHAWQLTQ GATVLGLFRV TPEIPAGLPS PRSE (SEQ ID NO:124), where X is any amino acid other than Ser. In some cases, X is Ala;

[0383] PAGLLDLRQG MFAQLVAQNV LLIGGPLSWY SDPGLAGVSX TGGLSYKEDT KELVVAKAGV YYVFFQLELR RVVAGEGSGS VSLALHLQPL RSAAGAAALA LTVDLPPASS EARNSAFGFQ GRLLHLSAGQ RLGVHLHTEA RARHAWQLTQ GATVLGLFRV TPEIPAGLPS PRSE (SEQ ID NO:125), where X is any amino acid other than Leu. In some cases, X is Ala;

[0384] PAGLLDLRQG MFAQLVAQNV LLIGGPLSWY SDPGLAGVSL XGGLSYKEDT KELVVAKAGV YYVFFQLELR RVVAGEGSGS VSLALHLQPL RSAAGAAALA LTVDLPPASS EARNSAFGFQ GRLLHLSAGQ RLGVHLHTEA RARHAWQLTQ GATVLGLFRV TPEIPAGLPS PRSE (SEQ ID NO:126), where X is any amino acid other than Thr. In some cases, X is Ala;

[0385] PAGLLDLRQG MFAQLVAQNV LLIGGPLSWY SDPGLAGVSL TXGLSYKEDT KELVVAKAGV YYVFFQLELR RVVAGEGSGS VSLALHLQPL RSAAGAAALA LTVDLPPASS EARNSAFGFQ GRLLHLSAGQ RLGVHLHTEA RARHAWQLTQ GATVLGLFRV TPEIPAGLPS PRSE (SEQ ID NO:127), where X is any amino acid other than Gly. In some cases, X is Ala;

[0386] PAGLLDLRQG MFAQLVAQNV LLIGGPLSWY SDPCLAGVSL TGXLSYKEDT KELVVAKAGV YYVFFQLELR RVVAGEGSGS VSLALHLQPL RSAAGAAALA LTVDLPPASS EARNSAFGFQ GRLLHLSAGQ RLGVHLHTEA RARHAWQLTQ GATVLGLFRV TPEIPAGLPS PRSE (SEQ ID NO:128), where X is any amino acid other than Gly. In some cases, X is Ala;

[0387] PAGLLDLRQG MFAQLVAQNV LLIGGPLSWY SDPGLAGVSL TGGXSYKEDT KELVVAKAGV YYVFFQLELR RVVAGEGSGS VSLALHLQPL RSAAGAAALA LTVDLPPASS EARNSAFGFQ GRLLHLSAGQ RLGVHLHTEA RARHAWQLTQ GATVLGLFRV TPEIPAGLPS PRSE (SEQ ID NO:129), where X is any amino acid other than Leu. In some cases, X is Ala;

[0388] PAGLLDLRQG MFAQLVAQNV LLIGGPLSWY SDPGLAGVSL TGGLXYKEDT KELVVAKAGV YYVFFQLELR RVVAGEGSGS VSLALHLQPL RSAAGAAALA LTVDLPPASS EARNSAFGFQ GRLLHLSAGQ RLGVHLHTEA RARHAWQLTQ GATVLGLFRV TPEIPAGLPS PRSE (SEQ ID NO:130), where X is any amino acid other than Ser. In some cases, X is Ala;

[0389] PAGLLDLRQG MFAQLVAQNV LLIGGPLSWY SDPGLAGVSL TGGLSXKEDT KELVVAKAGV YYVFFQLELR RVVAGEGSGS VSLALHLQPL RSAAGAAALA LTVDLPPASS EARNSAFGFQ GRLLHLSAGQ RLGVHLHTEA RARHAWQLTQ GATVLGLFRV TPEIPAGLPS PRSE (SEQ ID NO:131), where X is any amino acid other than Tyr. In some cases, X is Ala;

[0390] PAGLLDLRQG MFAQLVAQNV LLIGGPLSWY SDPGLAGVSL TGGLSYKXDT KELVVAKAGV YYVFFQLELR RVVAGEGSGS VSLALHLQPL RSAAGAAALA LTVDLPPASS EARNSAFGFQ GRLLHLSAGQ RLGVHLHTEA RARHAWQLTQ GATVLGLFRV TPEIPAGLPS PRSE (SEQ ID NO:132), where X is any amino acid other than Glu. In some cases, X is Ala;

[0391] PAGLLDLRQG MFAQLVAQNV LLIGGPLSWY SDPGLAGVSL TGGLSYKEXT KELVVAKAGV YYVFFQLELR RVVAGEGSGS VSLALHLQPL RSAAGAAALA LTVDLPPASS EARNSAFGFQ GRLLHLSAGQ RLGVHLHTEA RARHAWQLTQ GATVLGLFRV TPEIPAGLPS PRSE (SEQ ID NO:133), where X is any amino acid other than Asp. In some cases, X is Ala;

[0392] PAGLLDLRQG MFAQLVAQNV LLIGGPLSWY SDPGLAGVSL TGGLSYKEDX KELVVAKAGV YYVFFQLELR RVVAGEGSGS VSLALHLQPL RSAAGAAALA LTVDLPPASS EARNSAFGFQ GRLLHLSAGQ RLGVHLHTEA RARHAWQLTQ GATVLGLFRV TPEIPAGLPS PRSE (SEQ ID NO: 134), where X is any amino acid other than Thr. In some cases, X is Ala;

[0393] PAGLLDLRQG MFAQLVAQNV LLIGGPLSWY SDPGLAGVSL TGGLSYKEDT XELVVAKAGV YYVFFQLELR RVVAGEGSGS VSLALHLQPL RSAAGAAALA LTVDLPPASS EARNSAFGFQ GRLLHLSAGQ RLGVHLHTEA RARHAWQLTQ GATVLGLFRV TPEIPAGLPS PRSE (SEQ ID NO:135), where X is any amino acid other than Lys. In some cases, X is Ala;

[0394] PAGLLDLRQG MFAQLVAQNV LLIGGPLSWY SDPGLAGVSL TGGLSYKEDT KXLVVAKAGV YYVFFQLELR RVVAGEGSGS VSLALHLQPL RSAAGAAALA LTVDLPPASS EARNSAFGFQ GRLLHLSAGQ RLGVHLHTEA RARHAWQLTQ GATVLGLFRV TPEIPAGLPS PRSE (SEQ ID NO:136), where X is any amino acid other than Glu. In some cases, X is Ala;

[0395] PAGLLDLRQG MFAQLVAQNV LLIGGPLSWY SDPGLAGVSL TGGLSYKEDT KELVVAKAGV YYVXFQLELR RVVAGEGSGS VSLALHLQPL RSAAGAAALA LTVDLPPASS EARNSAFGFQ GRLLHLSAGQ RLGVHLHTEA RARHAWQLTQ GATVLGLFRV TPEIPAGLPS PRSE (SEQ ID NO: 137), where X is any amino acid other than Phe. In some cases, X is Ala;

[0396] PAGLLDLRQC MFAQLVAQNV LLIGGPLSWY SDPGLAGVSL TGGLSYKEDT KELVVAKAGV YYVFXQLELR RVVAGEGSGS VSLALHLQPL RSAAGAAALA LTVDLPPASS EARNSAFGFQ GRLLHLSAGQ RLGVHLHTEA RARHAWQLTQ GATVLGLFRV TPEIPAGLPS PRSE (SEQ ID NO:138), where X is any amino acid other than Phe. In some cases, X is Ala;

[0397] PAGLLDLRQG MFAQLVAQNV LLIGGPLSWY SDPGLAGVSL TGGLSYKEDT KELVVAKAGV YYVFFXLELR RVVAGEGSGS VSLALHLQPL RSAAGAAALA LTVDLPPASS EARNSAFGFQ GRLLHLSAGQ RLGVHLHTEA RARHAWQLTQ GATVLGLFRV TPEIPAGLPS PRSE (SEQ ID NO:139), where X is any amino acid other than Gln. In some cases, X is Ala;

[0398] PAGLLDLRQG MFAQLVAQNV LLIGGPLSWY SDPGLAGVSL TGGLSYKEDT KELVVAKAGV YYVFFQXELR RVVAGEGSGS VSLALHLQPL RSAAGAAALA LTVDLPPASS EARNSAFGFQ GRLLHLSAGQ RLGVHLHTEA RARHAWQLTQ GATVLGLFRV TPEIPAGLPS PRSE (SEQ ID NO:140), where X is any amino acid other than Leu. In some cases, X is Ala;

[0399] PAGLLDLRQG MFAQLVAQNV LLIGGPLSWY SDPGLAGVSL TGGLSYKEDT KELVVAKAGV YYVFFQLXLR RVVAGEGSGS VSLALHLQPL RSAAGAAALA LTVDLPPASS EARNSAFGFQ GRLLHLSAGQ RLGVHLHTEA RARHAWQLTQ GATVLGLFRV TPEIPAGLPS PRSE (SEQ ID NO:141), where X is any amino acid other than Glu. In some cases, X is Ala;

[0400] PAGLLDLRQG MFAQLVAQNV LLIGGPLSWY SDPGLAGVSL TGGLSYKEDT KELVVAKAGV YYVFFQLEXR RVVAGEGSGS VSLALHLQPL RSAAGAAALA LTVDLPPASS EARNSAFGFQ GRLLHLSAGQ RLGVHLHTEA RARHAWQLTQ GATVLGLFRV TPEIPAGLPS PRSE (SEQ ID NO:142), where X is any amino acid other than Leu. In some cases, X is Ala;

[0401] PAGLLDLRQG MFAQLVAQNV LLIGGPLSWY SDPGLAGVSL TGGLSYKEDT KELVVAKAGV YYVFFQLELX RVVAGEGSGS VSLALHLQPL RSAAGAAALA LTVDLPPASS EARNSAFGFQ GRLLHLSAGQ RLGVHLHTEA RARHAWQLTQ GATVLGLFRV TPEIPAGLPS PRSE (SEQ ID NO:143), where X is any amino acid other than Arg. In some cases, X is Ala;

[0402] PAGLLDLRQG MFAQLVAQNV LLIGGPLSWY SDPGLAGVSL TGGLSYKEDT KELVVAKAGV YYVFFQLELR XVVAGEGSGS VSLALHLQPL RSAAGAAALA LTVDLPPASS EARNSAFGFQ GRLLHLSAGQ RLGVHLHTEA RARHAWQLTQ GATVLGLFRV TPEIPAGLPS PRSE (SEQ ID NO:144), where X is any amino acid other than Arg. In some cases, X is Ala;

[0403] PAGLLDLRQG MFAQLVAQNV LLIGGPLSWY SDPGLAGVSL TGGLSYKEDT KELVVAKAGV YYVFFQLELR RXVAGEGSGS VSLALHLQPL RSAAGAAALA LTVDLPPASS EARNSAFGFQ GRLLHLSAGQ RLGVHLHTEA RARHAWQLTQ GATVLGLFRV TPEIPAGLPS PRSE (SEQ ID NO:145), where X is any amino acid other than Val. In some cases, X is Ala;

[0404] PAGLLDLRQG MFAQLVAQNV LLIGGPLSWY SDPGLAGVSL TGGLSYKEDT KELVVAKAGV YYVFFQLELR RVXAGEGSGS VSLALHLQPL RSAAGAAALA LTVDLPPASS EARNSAFGFQ GRLLHLSAGQ RLGVHLHTEA RARHAWQLTQ GATVLGLFRV TPEIPAGLPS PRSE (SEQ ID NO:146), where X is any amino acid other than Val. In some cases, X is Ala;

[0405] PAGLLDLRQG MFAQLVAQNV LLIGGPLSWY SDPGLAGVSL TGGLSYKEDT KELVVAKAGV YYVFFQLELR RVVAXEGSGS VSLALHLQPL RSAAGAAALA LTVDLPPASS EARNSAFGFQ GRLLHLSAGQ RLGVHLHTEA RARHAWQLTQ GATVLGLFRV TPEIPAGLPS PRSE (SEQ ID NO:147), where X is any amino acid other than Gly. In some cases, X is Ala;

[0406] PAGLLDLRQG MFAQLVAQNV LLIGGPLSWY SDPGLAGVSL TGGLSYKEDT KELVVAKAGV YYVFFQLELR RVVAGXGSGS VSLALHLQPL RSAAGAAALA LTVDLPPASS EARNSAFGFQ GRLLHLSAGQ RLGVHLHTEA RARHAWQLTQ GATVLGLFRV TPEIPAGLPS PRSE (SEQ ID NO:148), where X is any amino acid other than Glu. In some cases, X is Ala;

[0407] PAGLLDLRQG MFAQLVAQNV LLIGGPLSWY SDPGLAGVSL TGGLSYKEDT KELVVAKAGV YYVFFQLELR RVVAGEXSGS VSLALHLQPL RSAAGAAALA LTVDLPPASS EARNSAFGFQ GRLLHLSAGQ RLGVHLHTEA RARHAWQLTQ GATVLGLFRV TPEIPAGLPS PRSE (SEQ ID NO:149), where X is any amino acid other than Gly. In some cases, X is Ala;

[0408] PAGLLDLRQG MFAQLVAQNV LLIGGPLSWY SDPGLAGVSL TGGLSYKEDT KELVVAKAGV YYVFFQLELR RVVAGEGXGS VSLALHLQPL RSAAGAAALA LTVDLPPASS EARNSAFGFQ GRLLHLSAGQ RLGVHLHTEA RARHAWQLTQ GATVLGLFRV TPEIPAGLPS PRSE (SEQ ID NO:150), where X is any amino acid other than Ser. In some cases, X is Ala;

[0409] PAGLLDLRQG MFAQLVAQNV LLIGGPLSWY SDPGLAGVSL TGGLSYKEDT KELVVAKAGV YYVFFQLELR RVVAGEGSGS VSLALHLQPL RSAAGAAALA LTVXLPPASS EARNSAFGFQ GRLLHLSAGQ RLGVHLHTEA RARHAWQLTQ GATVLGLFRV TPEIPAGLPS PRSE (SEQ ID NO:151), where X is any amino acid other than Asp. In some cases, X is Ala;

[0410] PAGLLDLRQG MFAQLVAQNV LLIGGPLSWY SDPGLAGVSL TGGLSYKEDT KELVVAKAGV YYVFFQLELR RVVAGEGSGS VSLALHLQPL RSAAGAAALA LTVDXPPASS EARNSAFGFQ GRLLHLSAGQ RLGVHLHTEA RARHAWQLTQ GATVLGLFRV TPEIPAGLPS PRSE (SEQ ID NO:152), where X is any amino acid other than Leu. In some cases, X is Ala;

[0411] PAGLLDLRQG MFAQLVAQNV LLIGGPLSWY SDPGLAGVSL TGGLSYKEDT KELVVAKAGV YYVFFQLELR RVVAGEGSGS VSLALHLQPL RSAAGAAALA LTVDLXPASS EARNSAFGFQ GRLLHLSAGQ RLGVHLHTEA RARHAWQLTQ GATVLGLFRV TPEIPAGLPS PRSE (SEQ ID NO:153), where X is any amino acid other than Pro. In some cases, X is Ala;

[0412] PAGLLDLRQG MFAQLVAQNV LLIGGPLSWY SDPGLAGVSL TGGLSYKEDT KELVVAKAGV YYVFFQLELR RVVAGEGSGS VSLALHLQPL RSAAGAAALA LTVDLPPAXS EARNSAFGFQ GRLLHLSAGQ RLGVHLHTEA RARHAWQLTQ GATVLGLFRV TPEIPAGLPS PRSE (SEQ ID NO: 154), where X is any amino acid other than Ser. In some cases, X is Ala;

[0413] PAGLLDLRQG MFAQLVAQNV LLIGGPLSWY SDPGLAGVSL TGGLSYKEDT KELVVAKAGV YYVFFQLELR RVVAGEGSGS VSLALHLQPL RSAAGAAALA LTVDLPPASX EARNSAFGFQ GRLLHLSAGQ RLGVHLHTEA RARHAWQLTQ GATVLGLFRV TPEIPAGLPS PRSE (SEQ ID NO:155), where X is any amino acid other than Ser. In some cases, X is Ala;

[0414] PAGLLDLRQG MFAQLVAQNV LLIGGPLSWY SDPGLAGVSL TGGLSYKEDT KELVVAKAGV YYVFFQLELR RVVAGEGSGS VSLALHLQPL RSAAGAAALA LTVDLPPASX XARNSAFGFQ GRLLHLSAGQ RLGVHLHTEA RARHAWQLTQ GATVLGLFRV TPEIPAGLPS PRSE (SEQ ID NO:156), where X is any amino acid other than Glu. In some cases, X is Ala;

[0415] PAGLLDLRQG MFAQLVAQNV LLIGGPLSWY SDPGLAGVSL TGGLSYKEDT KELVVAKAGV YYVFFQLELR RVVAGEGSGS VSLALHLQPL RSAAGAAALA LTVDLPPASS EAXNSAFGFQ GRLLHLSAGQ RLGVHLHTEA RARHAWQLTQ GATVLGLFRV TPEIPAGLPS PRSE (SEQ ID NO:157), where X is any amino acid other than Arg. In some cases, X is Ala;

[0416] PAGLLDLRQG MFAQLVAQNV LLIGGPLSWY SDPGLAGVSL TGGLSYKEDT KELVVAKAGV YYVFFQLELR RVVAGEGSGS VSLALHLQPL RSAAGAAALA LTVDLPPASS EARXSAFGFQ GRLLHLSAGQ RLGVHLHTEA RARHAWQLTQ GATVLGLFRV TPEIPAGLPS PRSE (SEQ ID NO:158), where X is any amino acid other than Asn. In some cases, X is Ala;

[0417] PAGLLDLRQG MFAQLVAQNV LLIGGPLSWY SDPGLAGVSL TGGLSYKEDT KELVVAKAGV YYVFFQLELR RVVAGEGSGS VSLALHLQPL RSAAGAAALA LTVDLPPASS EARNXAFGFQ GRLLHLSAGQ RLGVHLHTEA RARHAWQLTQ GATVLGLFRV TPEIPAGLPS PRSE (SEQ ID NO:159), where X is any amino acid other than Ser. In some cases, X is Ala;

[0418] PAGLLDLRQG MFAQLVAQNV LLIGGPLSWY SDPGLAGVSL TGGLSYKEDT KELVVAKAGV YYVFFQLELR RVVAGEGSGS VSLALHLQPL RSAAGAAALA LTVDLPPASS EARNSAXGFQ GRLLHLSAGQ RLGVHLHTEA RARHAWQLTQ GATVLGLFRV TPEIPAGLPS PRSE (SEQ ID NO:160), where X is any amino acid other than Phe. In some cases, X is Ala;

[0419] PAGLLDLRQG MFAQLVAQNV LLIGGPLSWY SDPGLAGVSL TGGLSYKEDT KELVVAKAGV YYVFFQLELR RVVAGEGSGS VSLALHLQPL RSAAGAAALA LTVDLPPASS EARNSAFGFQ GRLLHLSAGX RLGVHLHTEA RARHAWQLTQ GATVLGLFRV TPEIPAGLPS PRSE (SEQ ID NO:161), where X is any amino acid other than Gln. In some cases, X is Ala;

[0420] PAGLLDLRQG MFAQLVAQNV LLIGGPLSWY SDPGLAGVSL TGGLSYKEDT KELVVAKAGV YYVFFQLELR RVVAGEGSGS VSLALHLQPL RSAAGAAALA LTVDLPPASS EARNSAFGFQ GRLLHLSAGQ XLGVHLHTEA RARHAWQLTQ GATVLGLFRV TPEIPAGLPS PRSE (SEQ ID NO:162), where X is any amino acid other than Arg. In some cases, X is Ala;

[0421] PAGLLDLRQG MFAQLVAQNV LLIGGPLSWY SDPGLAGVSL TGGLSYKEDT KELVVAKAGV YYVFFQLELR RVVAGEGSGS VSLALHLQPL RSAAGAAALA LTVDLPPASS EARNSAFGFQ GRLLHLSAGQ RXGVHLHTEA RARHAWQLTQ GATVLGLFRV TPEIPAGLPS PRSE (SEQ ID NO:163), where X is any amino acid other than Leu. In some cases, X is Ala;

[0422] PAGLLDLRQG MFAQLVAQNV LLIGGPLSWY SDPGLAGVSL TGGLSYKEDT KELVVAKAGV YYVFFQLELR RVVAGEGSGS VSLALHLQPL RSAAGAAALA LTVDLPPASS EARNSAFGFQ GRLLHLSAGQ RLXVHLHTEA RARHAWQLTQ GATVLGLFRV TPEIPAGLPS PRSE (SEQ ID NO:164), where X is any amino acid other than Gly. In some cases, X is Ala;

[0423] PAGLLDLRQG MFAQLVAQNV LLIGGPLSWY SDPGLAGVSL TGGLSYKEDT KELVVAKAGV YYVFFQLELR RVVAGEGSGS VSLALHLQPL RSAAGAAALA LTVDLPPASS EARNSAFGFQ GRLLHLSAGQ RLGXHLHTEA RARHAWQLTQ GATVLGLFRV TPEIPAGLPS PRSE (SEQ ID NO:165), where X is any amino acid other than Val. In some cases, X is Ala;

[0424] PAGLLDLRQG MFAQLVAQNV LLIGGPLSWY SDPGLAGVSL TGGLSYKEDT KELVVAKAGV YYVFFQLELR RVVAGEGSGS VSLALHLQPL RSAAGAAALA LTVDLPPASS EARNSAFGFQ GRLLHLSAGQ RLGVXLHTEA RARHAWQLTQ GATVLGLFRV TPEIPAGLPS PRSE (SEQ ID NO:166), where X is any amino acid other than His. In some cases, X is Ala;

[0425] PAGLLDLRQG MFAQLVAQNV LLIGGPLSWY SDPGLAGVSL TGGLSYKEDT KELVVAKAGV YYVFFQLELR RVVAGEGSGS VSLALHLQPL RSAAGAAALA LTVDLPPASS EARNSAFGFQ GRLLHLSAGQ RLGVHXHTEA RARHAWQLTQ GATVLGLFRV TPEIPAGLPS PRSE (SEQ ID NO:167), where X is any amino acid other than Leu. In some cases, X is Ala;

[0426] PAGLLDLRQG MFAQLVAQNV LLIGGPLSWY SDPGLAGVSL TGGLSYKEDT KELVVAKAGV YYVFFQLELR RVVAGEGSGS VSLALHLQPL RSAAGAAALA LTVDLPPASS EARNSAFGFQ GRLLHLSAGQ RLGVHLXTEA RARHAWQLTQ GATVLGLFRV TPEIPAGLPS PRSE (SEQ ID NO: 168), where X is any amino acid other than His. In some cases. X is Ala;

[0427] PAGLLDLRQG MFAQLVAQNV LLIGGPLSWY SDPGLAGVSL TGGLSYKEDT KELVVAKAGV YYVFFQLELR RVVAGEGSGS VSLALHLQPL RSAAGAAALA LTVDLPPASS EARNSAFGFQ GRLLHLSAGQ RLGVHLHXEA RARHAWQLTQ GATVLGLFRV TPEIPAGLPS PRSE (SEQ ID NO:169), where X is any amino acid other than Thr. In some cases, X is Ala;

[0428] PAGLLDLRQG MFAQLVAQNV LLIGGPLSWY SDPGLAGVSL TGGLSYKEDT KELVVAKAGV YYVFFQLELR RVVAGEGSGS VSLALHLQPL RSAAGAAALA LTFVDLPPASS EARNSAFGFQ GRLLHLSAGQ RLGVHLHTXA RARHAWQLTQ GATVLGLFRV TPEIPAGLPS PRSE (SEQ ID NO:170), where X is any amino acid other than Glu. In some cases, X is Ala;

[0429] PAGLLDLRQG MFAQLVAQNV LLIGGPLSWY SDPGLAGVSL TGGLSYKEDT KELVVAKAGV YYVFFQLELR RVVAGEGSGS VSLALHLQPL RSAAGAAALA LTVDLPPASS EARNSAFGFQ GRLLHLSAGQ RLGVHLHTEA XARHAWQLTQ GATVLGLFRV TPEIPAGLPS PRSE (SEQ ID NO:171), where X is any amino acid other than Arg. In some cases, X is Ala;

[0430] PAGLLDLRQG MFAQLVAQNV LLIGGPLSWY SDPGLAGVSL TGGLSYKEDT KELVVAKAGV YYVFFQLELR RVVAGEGSGS VSLALHLQPL RSAAGAAALA LTVDLPPASS EARNSAFGFQ GRLLHLSAGQ RLGVHLHTEA RAXHAWQLTQ GATVLGLFRV TPEIPAGLPS PRSE (SEQ ID NO:172), where X is any amino acid other than Arg. In some cases, X is Ala;

[0431] PAGLLDLRQG MFAQLVAQNV LLIGGPLSWY SDPGLAGVSL TGGLSYKEDT KELVVAKAGV YYVFFQLELR RVVAGEGSGS VSLALHLQPL RSAAGAAALA LTVDLPPASS EARNSAFGFQ GRLLHLSAGQ RLGVHLHTEA RAXAWQLTQ GATVLGLFRV TPEIPAGLPS PRSE (SEQ ID NO:173), where X is any amino acid other than His. In some cases, X is Ala;

[0432] PAGLLDLRQG MFAQLVAQNV LLIGGPLSWY SDPGLAGVSL TGGLSYKEDT KELVVAKAGV YYVFFQLELR RVVAGEGSGS VSLALHLQPL RSAAGAAALA LTVDLPPASS EARNSAFGFQ GRLLHLSAGQ RLGVHLHTEA RARHAXQLTQ GATVLGLFRV TPEIPAGLPS PRSE (SEQ ID NO:174), where X is any amino acid other than Trp. In some cases, X is Ala;

[0433] PAGLLDLRQG MFAQLVAQNV LLIGGPLSWY SDPGLAGVSL TGGLSYKEDT KELVVAKAGV YYVFFQLELR RVVAGEGSGS VSLALHLQPL RSAAGAAALA LTVDLPPASS EARNSAFGFQ GRLLHLSAGQ RLGVHLHTEA RARHAWQXTQ GATVLGLFRV TPEIPAGLPS PRSE (SEQ ID NO:175), where X is any amino acid other than Leu. In some cases, X is Ala;

[0434] PAGLLDLRQG MFAQLVAQNV LLIGGPLSWY SDPGLAGVSL TGGLSYKEDT KELVVAKAGV YYVFFQLELR RVVAGEGSGS VSLALHLQPL RSAAGAAALA LTVDLPPASS EARNSAFGFQ GRLLHLSAGQ RLGVHIHTEA RARIHAWQLXQ GATVLGLFRV TPEIPAGLPS PRSE (SEQ ID NO:176), where X is any amino acid other than Thr. In some cases, X is Ala;

[0435] PAGLLDLRQG MFAQLVAQNV LLIGGPLSWY SDPGLAGVSL TGGLSYKEDT KELVVAKAGV YYVFFQLELR RVVAGEGSGS VSLALHLQPL RSAAGAAALA LTVDLPPASS EARNSAFGFQ GRLLHLSAGQ RLGVHLHTEA RARHAWQLTX GATVLGLFRV TPEIPAGLPS PRSE (SEQ ID NO: 177), where X is any amino acid other than Gln. In some cases, X is Ala;

[0436] PAGLLDLRQG MFAQLVAQNV LLIGGPLSWY SDPGLAGVSL TGGLSYKEDT KELVVAKAGV YYVFFQLELR RVVAGEGSGS VSLALHLQPL RSAAGAAALA LTVDLPPASS EARNSAFGFQ GRLLHLSAGQ RLGVHLHTEA RARHAWQLTQ XATVLGLFRV TPEIPAGLPS PRSE (SEQ ID NO:178), where X is any amino acid other than Gly. In some cases, X is Ala;

[0437] PAGLLDLRQG MFAQLVAQNV LLIGGPLSWY SDPGLAGVSL TGGLSYKEDT KELVVAKAGV YYVFFQLELR RVVAGEGSGS VSLALHLQPL RSAAGAAALA LTVDLPPASS EARNSAFGFQ GRLLHLSAGQ RLGVHLHTEA RARHAWQLTQ GAXVLGLFRV TPEIPAGLPS PRSE (SEQ ID NO:179), where X is any amino acid other than Thr. In some cases, X is Ala; and

[0438] PAGLLDLRQG MFAQLVAQNV LLIGGPLSWY SDPGLAGVSL TGGLSYKEDT KELVVAKAGV YYVFFQLELR RVVAGEGSGS VSLALHLQPL RSAAGAAALA LTVDLPPASS EARNSAFGFQ GRLLHLSAGQ RLGVHLHTEA RARHAWQLTQ GATXLGLFRV TPEIPAGLPS PRSE (SEQ ID NO:180), where X is any amino acid other than Val. In some cases, X is Ala.

### IL-2 Variants

[0439] In some cases, a variant immunomodulatory polypeptide present in a TMMP of the present disclosure is a variant IL-2 polypeptide. Wild-type IL-2 binds to IL-2 receptor (IL-2R), i.e., a heterotrimeric polypeptide comprising IL-2Ra, IL-2Rβ, and IL-2Rγ.

[0440] A wild-type IL-2 amino acid sequence can be as follows: APTSSSTKKT QLQLEHLLLD LQMILNGTNN YKNPKLTRML TFKFYMPKKA TELKHLQCLEEELKPLFEVTL NLAQSKNFHL RPRDLISNIN VIVLELKGSE TTFMCEYADE TATIVEFLNRWITFCQSIIS TJT (SEQ ID NO:15).

[0441] Wild-type IL2 binds to an IL2 receptor (IL2R) on the surface of a cell. An IL2 receptor is in some cases a heterotrimeric polypeptide comprising an alpha chain (IL-2Rα; also referred to as CD25), a beta chain (IL-2Rβ; also referred to as CD122: and a gamma chain (IL-2Rγ; also referred to as CD132). Amino acid sequences of human IL-2Rα, IL2Rβ, and IL-2Rγ can be as follows.

Human IL-2Rα:
(SEQ ID NO: 16)
ELCDDDPPE IPHATFKAMA YKEGTMLNCE CKRGFRRIKS
GSLYMLCTGN SSHSSWDNQC QCTSSATRNT TKQVTPQPEE
QKERKTTEMQ SPMQPVDQAS LPGHCREPPP WENEATERIY
HFVVGQMVYY QCVQGYRALH RGPAESVCKM THGKTRWTQP
QLICTGEMET SQFPGEEKPQ ASPEGRPESE TSCLVTTTDF
QIQTEMAATM ETSIFTTEYQ VAVAGCVFLL ISVLLLSGLT
WQRRQRKSRR TI.
Human IL-2Rβ:
(SEQ ID NO:17)
VNG TSQFTCFYNS RANISCVWSQ DGALQDTSCQ VHAWPDRRRW
NQTCELLPVS QASWACNLIL GAPDSQKLTT VDIVTLRVLC
REGVRWRVMA IQDFKPFENL RLMAPISLQV VHVETHRCNI
SWEISQASHY FERHLEFEAR TLSPGHTWEE APLLTLKQKQ
EWICLETLTP DTQYEFQVRV KPLQGEFTTW SPWSQPLAFR
TKPAALGKDT IPWLGHLLVG LSGAFGFIIL VYLLINCRNT
GPWLKKVLKC NTPDPSKFFS QLSSEHGGDV QKWLSSPFPS
SSFSPGGLAP EISPLEVLER DKVTQLLLQQ DKVPEPASLS
SNHSLTSCFT NQGYFFFHLP DALEIEACQV YFTYDPYSEE
DPDEGVAGAP TGSSPQPLQP LSGEDDAYCT FPSRDDLLLF
SPSLLGGPSP PSTAPGGSGA GEERMPPSLQ ERVPRDWDPQ
PLGPPTPGVP DLVDFQPPPE LVLREAGEEV PDAGPREGVS
FPWSRPPGQG EFRALNARLP LNTDAYLSLQ ELQGQDPTHL V.
Human IL-2Rγ:
(SEQ ID NO:18)
LNTTILTP NGNEDTTADF FLTTMPTDSL SVSTLPLPEV
QCFVFNVEYM NCTWNSSSEP QPTNLTLHYW YKNSDNDKVQ
KCSHYLFSEE ITSGCQLQKK EIHLYQTFVV QLQDPREPRR
QATQMLKLQN LVIPWAPENL TLHKLSESQL ELNWNNRFLN
HCLEHLVQYR TDWDHSWTEQ SVDYRHKFSL PSVDGQKRYT
FRVRSRFNPL CGSAQHWSEW SHPIHWGSNT SKENPFLFAL
EAVVISVGSM GLIISLLCVY FWLERTMPRI PTLKNLEDLV
TEYHGNFSAW SGVSKGLAES LQPDYSERLC LVSEIPPKGG
ALGEGPGASP CNQHSPYWAP PCYTLKPET.

[0442] In some cases, where a TMMP of the present disclosure comprises a variant IL-2 polypeptide, a “cognate co-immunomodulatory polypeptide” is an IL-2R comprising polypeptides comprising the amino acid sequences of SEQ ID NO:16, 17, and 18.

[0443] In some cases, a variant IL-2 polypeptide exhibits reduced binding affinity to IL-2R, compared to the binding affinity of a IL-2 polypeptide comprising the amino acid sequence set forth in SEQ ID NO:15. For example, in some cases, a variant IL-2 polypeptide binds IL-2R with a binding affinity that is at least 10% less, at least 15% less, at least 20% less, at least 25%, at least 30% less, at least 35% less, at least 40% less, at least 45% less, at least 50% less, at least 55% less, at least 60% less, at least 65% less, at least 70% less, at least 75% less, at least 80% less, at least 85% less, at least 90% less, at least 95% less, or more than 95% less, than the binding affinity of an IL-2 polypeptide comprising the amino acid sequence set forth in SEQ ID NO:15 for an IL-2R (e.g., an IL-2R comprising polypeptides comprising the amino acid sequence set forth in SEQ ID NOs:16-18), when assayed under the same conditions.

[0444] In some cases, a variant IL-2 polypeptide has a binding affinity to IL-2R that is from 100 nM to 100 μM. As another example, in some cases, a variant IL-2 polypeptide has a binding affinity for IL-2R (e.g., an IL-2R comprising polypeptides comprising the amino acid sequence set forth in SEQ ID NOs:16-18) that is from about 100 nM to 150 nM, from about 150 nM to about 200 nM, from about 200 nM to about 250 nM, from about 250 nM to about 300 nM, from about 300 nM to about 350 nM, from about 350 nM to about 400 nM, from about 400 nM to about 500 nM, from about 500 nM to about 600 nM, from about 600 nM to about 700 nM, from about 700 nM to about 800 nM, from about 800 nM to about 900 nM, from about 900 nM to about 1 ELM, to about 1 μM to about 5 μM, from about 5 μM to about 10 μM, from about 10 μM to about 15 μM, from about 15 μM to about 20 μM, from about 20 μM to about 25 μM, from about 25 μM to about 50 μM, from about 50 μM to about 75 μM, or from about 75 μM to about 100 μM.

[0445] In some cases, a variant IL-2 polypeptide has a single amino acid substitution compared to the IL-2 amino acid sequence set forth in SEQ ID NO:15. In some cases, a variant IL-2 polypeptide has from 2 to 10 amino acid substitutions compared to the IL-2 amino acid sequence set forth in SEQ ID NO:15. In some cases, a variant IL-2 polypeptide has 2 amino acid substitutions compared to the IL-2 amino acid sequence set forth in SEQ ID NO:15. In some cases, a variant IL-2 polypeptide has 3 amino acid substitutions compared to the IL-2 amino acid sequence set forth in SEQ ID NO:15. In some cases, a variant IL-2 polypeptide has 4 amino acid substitutions compared to the IL-2 amino acid sequence set forth in SEQ ID NO:15. In some cases, a variant IL-2 polypeptide has 5 amino acid substitutions compared to the IL-2 amino acid sequence set forth in SEQ ID NO:15. In some cases, a variant IL-2 polypeptide has 6 amino acid substitutions compared to the IL-2 amino acid sequence set forth in SEQ ID NO: 15. In some cases, a variant IL-2 polypeptide has 7 amino acid substitutions compared to the IL-2 amino acid sequence set forth in SEQ ID NO:15. In some cases, a variant IL-2 polypeptide has 8 amino acid substitutions compared to the IL-2 amino acid sequence set forth in SEQ ID NO:15. In some cases, a variant IL-2 polypeptide has 9 amino acid substitutions compared to the IL-2 amino acid sequence set forth in SEQ ID NO:15. In some cases, a variant IL-2 polypeptide has 10 amino acid substitutions compared to the IL-2 amino acid sequence set forth in SEQ ID NO: 15.

[0446] Suitable IL-2 variants include a polypeptide that comprises an amino acid sequence having at least 90%, at least 95%, at least 98%, at least 99%, or 100%, amino acid sequence identity to any one of the following amino acid sequences:

[0447] APTSSSTKKT QLQLEHLLLD LQMILNGINN YKNPKLTRML TXKFYMPKKA TELKHLQCLE EELKPLEEVL NLAQSKNFHL RPRDLISNIN VIVLELKGSE TTFMCEYADE TATIVEFLNR WITFCQSIIS TLT (SEQ ID NO:181), where X is any amino acid other than Phe. In some cases, X is Ala. In some cases, X is Met. In some cases, X is Pro. In some cases, X is Ser. In some cases, X is Thr. In some cases, X is Trp. In some cases, X is Tyr. In some cases, X is Val. In some cases, X is His;

[0448] APTSSSTKKT QLQLEHLLLX LQMILNGINN YKNPKLTRML TFKFYMPKKA TELKHLQCLE EELKPLEEVL NLAQSKNFHL RPRDLISNIN VIVLELKGSE TTFMCEYADE TATIVEFLNR WITFCQSIIS TLT (SEQ ID NO:182), where X is any amino acid other than Asp. In some cases, X is Ala;

[0449] APTSSSTKKT QLQLXHLLLD LQMILNGINN YKNPKLTRML TFKFYMPKKA TELKHLQCLE EELKPLEEVL NLAQSKNFHL RPRDLISNIN VIVLELKGSE TTFMCEYADE TATIVEFLNR WITFCQSIIS TLT (SEQ ID NO:183), where X is any amino acid other than Glu. In some cases, X is Ala.

[0450] APTSSSTKKT QLQLEXLLD LQMILNGINN YKNPKLTRML TFKFYMPKKA TELKHLQCLE EELKPLEEVL NLAQSKNFHL RPRDLISNIN VIVLELKGSE TTFMCEYADE TATIVEFLNR WITFCQSIIS TLT (SEQ ID NO: 184), where X is any amino acid other than His. In some cases, X is Ala. In some cases, X is Thr. In some cases, X is Asn. In some cases, X is Cys. In some cases, X is Gin. In some cases, X is Met. In some cases, X is Val. In some cases, X is Trp;

[0451] APTSSSTKKT QLQLEXLLLD LQMILNGINN YKNPKLTRML TFKFYMPKKA TELKHLQCLE EELKPLEEVL NLAQSKNFHL RPRDLISNIN VIVLELKGSE TTFMCEYADE TATIVEFLNR WITFCQSIIS TLT (SEQ ID NO:185), where X is any amino acid other than His. In some cases, X is Ala. In some cases, X is Arg. In some cases, X is Asn. In some cases, X is Asp. In some cases, X is Cys. In some cases, X is Glu. In some cases, X is Gin. In some cases, X is Gly. In some cases, X is lie. In some cases, X is Lys. In some cases, X is Leu. In some cases, X is Met. In some cases, X is Phe. In some cases, X is Pro. In some cases. X is Ser. In some cases, X is Thr. In some cases, X is Tyr. In some cases, X is Trp. In some cases, X is Val;

[0452] APTSSSTKKT QLQLEHLLLD LQMILNGINN YKNPKLTRML TFKFXMSKKA TELKHLQCLE EELKPLEEVL NLAQSKNFHL RPRDLISNIN VIVLELKGSE TTFMCEYADE TATIVEFLNR WITFCQSIIS TLT (SEQ ID NO: 186), where X is any amino acid other than Tyr. In some cases, X is Ala;

[0453] APTSSSTKKT QLQLEHLLLD LQMILNGINN YKNPKLTRML TFKFYMPKKA TELKHLQCLE EELKPLEEVL NLAQSKNFHL RPRDLISNIN VIVLELKGSE TTFMCEYADE TATIVEFLNR WITFCXSIIS TLT (SEQ ID NO:187), where X is any amino acid other than Gln. In some cases. X is Ala;

[0454] APTSSSTKKT QLQLEX₁LLLD LQMILNGINN YKNPKLTRML TX₂KFYMPKKA TELKHLQCLE EELKPLEEVL NLAQSKNFHL RPRDLISNIN VIVLELKGSE TTFMCEYADE TATIVEFLNR WITFCQSIIS TLT (SEQ ID NO:188), where X₁ is any amino acid other than His, and where X₂ is any amino acid other than Phe. In some cases. X₁ is Ala. In some cases, X₂ is Ala. In some cases, X₁ is Ala; and X₂ is Ala. In some cases, X₁ is Thr; and X₂ is Ala;

[0455] APTSSSTKKT QLQLEHLLLX₁ LQMILNGINN YKNPKLTRML TX₂KFYMPKKA TELKHLQCLE EELKPLEEVL NLAQSKNFHL RPRDLISNIN VIVLELKGSE TTFMCEYADE TATIVEFLNR WITFCQSIIS TLT (SEQ ID NO:189), where X₁ is any amino acid other than Asp; and where X₂ is any amino acid other than Phe. In some cases, X₁ is Ala. In some cases, X₂ is Ala. In some cases, X₁ is Ala; and X₂ is Ala;

[0456] APTSSSTKKT QLQLX₁HLLX₂ LQMTLNGINN YKNPKLTRML TX₃KFYMPKKA TELKHLQCLE EELKPLEEVL NLAQSKNFHL RPRDLISNIN VTVLELKGSE TTFMCEYADE TATIVEFLNR WITFCQSIIS TLT (SEQ ID NO:190), where X₁ is any amino acid other than Glu; where X₂ is any amino acid other than Asp; and where X₃ is any amino acid other than Phe. In some cases, X₁ is Ala. In some cases, X₂ is Ala. In some cases, X₃ is Ala. In some cases, X₁ is Ala; X₂ is Ala; and X₃ is Ala;

[0457] APTSSSTKKT QLQLEX₁LLLX₂ LQMILNGINN YKNPKLTRML TX₃KFYMPKKA TELKHLQCLE EELKPLEEVL NLAQSKNFHL RPRDLISNIN VIVLELKGSE TTFMCEYADE TATIVEFLNR WITFCQSIIS TLT (SEQ ID NO:191), where X₁ is any amino acid other than His; where X₂ is any amino acid other than Asp; and where X₃ is any amino acid other than Phe. In some cases, X₁ is Ala. In some cases, X₂ is Ala. In some cases, X₃ is Ala. In some cases, X₁ is Ala; X₂ is Ala; and X₃ is Ala;

[0458] APTSSSTKKT QLQLEHLLLX₁ LQMILNGINN YKNPKLTRML TX₂KFYMPKKA TELKHLQCLE EELKPLEEVL NLAQSKNFHL RPRDLISNIN VIVLELKGSE TTFMCEYADE TATIVEFLNR WITFCX₃SIIS TLT (SEQ ID NO:192), where X₁ is any amino acid other than Asp; where X₂ is any amino acid other than Phe; and where X₃ is any amino acid other than Gin. In some cases, X₁ is Ala. In some cases, X₂ is Ala. In some cases, X₁ is Ala. In some cases, X₁ is Ala: X₂ is Ala; and X₃ is Ala;

[0459] APTSSSTKKT QLQLEHLLLX₁ LQMILNGINN YKNPKLTRML TX₂KFX₃MPKKA TELKHLQCLE EELKPLEEVL NLAQSKNFHL RPRDLISNIN VIVLELKGSE TTFMCEYADE TATIVEFLNR WITFCQSIIS TLT (SEQ ID NO:193), where X₁ is any amino acid other than Asp; where X₂ is any amino acid other than Phe; and where X₃ is any amino acid other than Tyr. In some cases, X₁ is Ala. In some cases. X₂ is Ala. In some cases, X₃ is Ala. In some cases, X₁ is Ala; X₂ is Ala; and X₃ is Ala;

[0460] APTSSSTKKT QLQLEX₁LLLX₂ LQMILNGINN YKNPKLTRML TX₃KFX₄MPKKA TELKHLQCLE EELKPLEEVL NLAQSKNFHL RPRDLISNIN VIVLELKGSE TTFMCEYADE TATIVEFLNR WITFCQSIIS TLT (SEQ ID NO:194), where X₁ is any amino acid other than His; where X₂ is any amino acid other than Asp; where X₃ is any amino acid other than Phe; and where X₄ is any amino acid other than Tyr. In some cases, X₁ is Ala. In some cases, X₂ is Ala. In some cases, X₃ is Ala. In some cases, X₄ is Ala. In some cases, X₁ is Ala; X₂ is Ala; X₃ is Ala; and X₄ is Ala;

[0461] APTSSSTKKT QLQLEHLLLX₁ LQMILNGINN YKNPKLTRML TX₂KFX₃MPKKA TELKHLQCLE EELKPLEEVL NLAQSKNFHL RPRDLISNIN VIVLELKGSE TTFMCEYADE TATIVEFLNR WITFCX₄SIIS TLT (SEQ ID NO:195), where X₁ is any amino acid other than Asp; where X₂ is any amino acid other than Phe; where X₃ is any amino acid other than Tyr; and where X₄ is any amino acid other than Gin. In some cases, X₁ is Ala. In some cases, X₂ is Ala. In some cases, X₃ is Ala. In some cases, X₄ is Ala. In some cases, X₁ is Ala; X₂ is Ala; X₃ is Ala; and X₄ is Ala;

[0462] APTSSSTKKT QLQLEX₁LLX₂ LQMILNGINN YKNPKLTRML TX₃KFX₄MPKKA TELKHLQCLE EELKPLEEVL NLAQSKNFHL RPRDLISNIN VIVLELKGSE TTFMCEYADE TATIVEFLNR WITFCX₅SIIS TLT (SEQ ID NO:196), where X₁ is any amino acid other than His; where X₂ is any amino acid other than Asp; where X₃ is any amino acid other than Phe; where X₄ is any amino acid other than Tyr; and where X₅ is any amino acid other than Gin. In some cases. X₁ is Ala. In some cases, X₂ is Ala. In some cases, X₃ is Ala. In some cases, X₄ is Ala. In some cases, X₅ is Ala. In some cases, X₁ is Ala; X₂ is Ala; X₃ is Ala; X₄ is Ala; X₅ is Ala; and

[0463] APTSSSTKKT QLQLEX₁LLLD LQMILNGINN YKNPKLTRML TX₂KFYMPKKA TELKHLQCLE EELKPLEEVL NLAQSKNFHL RPRDLISNIN VIVLELKGSE TTFMCEYADE TATIVEFLNR WITFCX₃SIIS TLT (SEQ ID NO:197), where X₁ is any amino acid other than His; where X₂ is any amino acid other than Phe; and where X₃ is any amino acid other than Gin. In some cases, X₁ is Ala. In some cases, X₂ is Ala. In some cases, X₃ is Ala. In some cases, X₁ is Ala; X₂ is Ala; and X₃ is Ala.

### Additional Polypeptides

[0464] A polypeptide chain of a TMMP of the present disclosure can include one or more polypeptides in addition to those described above. Suitable additional polypeptides include epitope tags and affinity domains. The one or more additional polypeptide can be included at the N-terminus of a polypeptide chain of a TMMP, at the C-terminus of a polypeptide chain of a TMMP, or internally within a polypeptide chain of a TMMP.

### Epitope Tag

[0465] Suitable epitope tags include, but are not limited to, hemagglutinin (HA; e.g., YPYDVPDYA (SEQ ID NO:271); FLAG (e.g., DYKDDDDK (SEQ ID NO:272); c-myc (e.g., EQKLISEEDL; SEQ ID NO:273), and the like.

### Affinity Domain

[0466] Affinity domains include peptide sequences that can interact with a binding partner, e.g., such as one immobilized on a solid support, useful for identification or purification. DNA sequences encoding multiple consecutive single amino acids, such as histidine, when fused to the expressed protein, may be used for one-step purification of the recombinant protein by high affinity binding to a resin column, such as nickel sepharose. Exemplary affinity domains include His5 (HHHHH) (SEQ ID NO:271), HisX6 (HHHHHH) (SEQ ID NO:275), C-myc (EQKLISEEDL) (SEQ ID NO:276), Flag (DYKDDDDK) (SEQ ID NO:277), StrepTag (WSHPQFEK) (SEQ ID NO:278), hemagglutinin, e.g., HA Tag (YPYDVPDYA) (SEQ ID NO:279), glutathione-S-transferase (GST), thioredoxin, cellulose binding domain, RYIRS (SEQ ID NO:280), Phe-His-His-Thr (SEQ ID NO:281), chitin binding domain, S-peptide, T7 peptide, SH2 domain, C-end RNA tag, WEAAAREACCRECCARA (SEQ ID NO:282), metal binding domains, e.g., zinc binding domains or calcium binding domains such as those from calcium-binding proteins, e.g., calmodulin, troponin C, calcineurin B, myosin light chain, recoverin, S-modulin, visinin, VILIP, neurocalcin, hippocalcin, frequenin, caltractin, calpain large-subunit, 5100 proteins, parvalbumin, calbindin D9K, calbindin D28K, and calretinin, inteins, biotin, streptavidin, MyoD, Id, leucine zipper sequences, and maltose binding protein.

### Drug Conjugates

[0467] A polypeptide chain of a TMMP of the present disclosure can comprise a small molecule drug linked (e.g., covalently attached) to the polypeptide chain. For example, where a TMMP of the present disclosure comprises an Fc polypeptide, the Fc polypeptide can comprise a covalently linked small molecule drug. In some cases, the small molecule drug is a cancer chemotherapeutic agent, e.g., a cytotoxic agent. A polypeptide chain of a TMMP of the present disclosure can comprise a cytotoxic agent linked (e.g., covalently attached) to the polypeptide chain. For example, where a TMMP of the present disclosure comprises an Fc polypeptide, the Fc polypeptide can comprise a covalently linked cytotoxic agent. Cytotoxic agents include prodrugs.

[0468] A drug (e.g., a cancer chemotherapeutic agent) can be linked directly or indirectly to a polypeptide chain of a TMMP of the present disclosure. For example, where a TMMP of the present disclosure comprises an Fe polypeptide, a drug (e.g., a cancer chemotherapeutic agent) can be linked directly or indirectly to the Fc polypeptide. Direct linkage can involve linkage directly to an amino acid side chain. Indirect linkage can be linkage via a linker. A drug (e.g., a cancer chemotherapeutic agent) can be linked to a polypeptide chain (e.g., an Fc polypeptide) of a TMMP of the present disclosure via a thioether bond, an amide bond, a carbamate bond, a disulfide bond, or an ether bond.

[0469] Linkers include cleavable linkers and non-cleavable linkers. In some cases, the linker is a protease-cleavable linker. Suitable linkers include, e.g., peptides (e.g., from 2 to 10 amino acids in length; e.g., 2, 3, 4, 5, 6, 7, 8, 9, or 10 amino acids in length), alkyl chains, poly(ethylene glycol), disulfide groups, thioether groups, acid labile groups, photolabile groups, peptidase labile groups, and esterase labile groups. Non-limiting example of suitable linkers are: i) N-succinimidyl-(N-maleimidopropionamido)-tetraethyleneglycol]ester (NHS-PEG4-maleimide); ii) N-succinimidyl 4-(2-pyridyldithio)butanoate (SPDB); N-succinimidyl 4-(2-pyridyldithio)2-sulfobutanoate (sulfo-SPDB); N-succinimidyl 4-(2-pyridyldithio) pentanoate (SPP); N-succinimidyl-4-(N-maleimidomethyl)-cyclohexane-1-carboxy-(6-amidocaproate) (LC-SMCC); κ-maleimidoundecanoic acid N-succinimidyl ester (KMUA); γ-maleimide butyric acid N-succinimidyl ester (GMBS); ε-maleimidocaproic acid N-hydroxysuccinimide ester (EMCS); m-maleimide benzoyl-N-hydroxsuccinimide ester (MBS); N-(α-maleimidoacetoxy)-succinimide ester (AMAS); succinimidyl-6-(D-maleimidopropionamide)hexanoate (SMPH); N-succinimidyl 4-(p-maleimidophenyl)butyrate (SMPB); N-(p-maleimidophenyl)isocyanate (PMPI); N-succinimidyl 4(2-pyridylthio)pentanoate (SPP); N-succinimidyl(4-iodo-acetyl)aminobenzoate (SIAB); 6-maleimidocaproyl (MC); maleimidepropionyl (MP); p-aminobenzyloxycarbonyl (PAB); N-succinimidyl 4-(maleimidomethyl)cyclohexanecarboxylate (SMCC); N-succinimidyl-4-(N-maleimidomethyl)-cyclohexane-1-carboxy-(6-amidocaproate), a “long chain” analog of SMCC (LC-SMCC); 3-maleimidopropionic acid N-succinimidyl ester (BMPS); N-succinimidyl iodoacetate (SIA); N-succinimidyl bromoacetate (SBA); and N-succinimidyl 3-(bromoacetamido)propionate (SBAP).

[0470] A polypeptide (e.g., an Fc polypeptide) can be modified with crosslinking reagents such as succinimidyl 4-(N-maleimidomethyl)-cyclohexane-1-carboxylate (SMCC), sulfo-SMCC, maleimidobenzoyl-N-hydroxysuccinimide ester (MBS), sulfo-MBS or succinimidyl-iodoacetate, as described in the literature, to introduce 1-10 reactive groups. The modified Fc polypeptide is then reacted with a thiol-containing cytotoxic agent to produce a conjugate.

[0471] For example, where a TMMP of the present disclosure comprises an Fc polypeptide, the polypeptide chain comprising the Fc polypeptide can be of the formula (A)-(L)-(C), where (A) is the polypeptide chain comprising the Fc polypeptide; where (L), if present, is a linker; and where (C) is a cytotoxic agent. (L), if present, links (A) to (C). In some cases, the polypeptide chain comprising the Fc polypeptide can comprise more than one cytotoxic agent (e.g., 2, 3, 4, or 5, or more than 5, cytotoxic agents).

[0472] Suitable drugs include, e.g., rapamycin. Suitable drugs include, e.g., retinoids, such as all-trans retinoic acid (ATRA); vitamin D3; a vitamin D3 analog; and the like. As noted above, in some cases, a drug is a cytotoxic agent. Cytotoxic agents are known in the art. A suitable cytotoxic agent can be any compound that results in the death of a cell, or induces cell death, or in some manner decreases cell viability, and includes, for example, maytansinoids and maytansinoid analogs, benzodiazepines, taxoids, CC-1065 and CC-1065 analogs, duocarmycins and duocarmycin analogs, enediynes, such as calicheamicins, dolastatin and dolastatin analogs including auristatins, tomaymycin derivatives, leptomycin derivatives, methotrexate, cisplatin, carboplatin, daunorubicin, doxorubicin, vincristine, vinblastine, melphalan, mitomycin C, chlorambucil and morpholino doxorubicin.

[0473] For example, in some cases, the cytotoxic agent is a compound that inhibits microtubule formation in eukaryotic cells. Such agents include, e.g., maytansinoid, benzodiazepine, taxoid, CC-1065, duocarmycin, a duocarmycin analog, calicheamicin, dolastatin, a dolastatin analog, auristatin, tomaymycin, and leptomycin, or a pro-drug of any one of the foregoing. Maytansinoid compounds include, e.g., N(2′)-deacetyl-N(2′)-(3-mercapto-1-oxopropyl)-maytansine (DM1); N(2′)-deacetyl-N(2′)-(4-mercapto-1-oxopentyl)-maytansine (DM3); and N(2′)-deacetyl-N2-(4-mercapto-4-methyl-1-oxopentyl)-maytansine (DM4). Benzodiazepines include, e.g., indolinobenzodiazepine and oxazolidinbenzodiazepines.

[0474] Cytotoxic agents include taxol; cytochalasin B; gramicidin D; ethidium bromide; emetine; mitomycin; etoposide; tenoposide; vincristine; vinblastine; colchicin; doxorubicin; daunorubicin; dihydroxy anthracin dione; maytansine or an analog or derivative thereof; an auristatin or a functional peptide analog or derivative thereof; dolastatin 10 or 15 or an analogue thereof; irinotecan or an analogue thereof; mitoxantrone; mithramycin; actinomycin D; I-dehydrotestosterone; a glucocorticoid; procaine; tetracaine; lidocaine; propranolol; puromycin; calicheamicin or an analog or derivative thereof; an antimetabolite; 6 mercaptopurine; 6 thioguanine; cytarabine; fludarabin; 5 fluorouracil; decarbazine; hydroxyurea; asparaginase; gemcitabine; cladribine; an alkylating agent; a platinum derivative; duocarmycin A; duocarmycin SA; rachelmycin (CC-1065) or an analog or derivative thereof; an antibiotic; pyrrolo[2,1-c][1,4]-benzodiazepines (PDB); diphtheria toxin; ricin toxin; cholera toxin; a Shiga-like toxin; LT toxin; C3 toxin; Shiga toxin; pertussis toxin; tetanus toxin; soybean Bowman-Birk protease inhibitor; Pseudomonas exotoxin; alorin; saporin; modeccin; gelanin; abrin A chain; modeccin A chain; alpha-sarcin; Aleurites fordii proteins; dianthin proteins; Phytolacca americana proteins; Momordica charantia inhibitor; curcin; crotin; Sapaonaria officinalis inhibitor; gelonin; mitogellin; restrictocin; phenomycin; enomycin toxins; ribonuclease (RNase); DNase I; Staphylococcal enterotoxin A; pokeweed antiviral protein; diphtherin toxin; and Pseudomonas endotoxin.

### Exemplary TMMPs

[0475] A TMMP of the present disclosure comprises at least one heterodimer comprising: a) a first polypeptide comprising: i) a WT-1 peptide epitope; and ii) first MHC polypeptide; b) a second polypeptide comprising a second MHC polypeptide, and c) at least one immunomodulatory polypeptide, where the first and/or the second polypeptide comprises the immunomodulatory polypeptide. Thus, in some cases, a TMMP of the present disclosure comprises at least one heterodimer comprising: a) a first polypeptide comprising: i) a WT-1 peptide epitope; ii) first MHC polypeptide; and iii) at least one immunomodulatory polypeptide; and b) a second polypeptide comprising a second MHC polypeptide. In other instances, a TMMP of the present disclosure comprises at least one heterodimer comprising: a) a first polypeptide comprising: i) a WT-1 peptide epitope; and ii) first MHC polypeptide; and b) a second polypeptide comprising: i) a second MHC polypeptide; and ii) at least one immunomodulatory polypeptide. In some cases, a TMMP of the present disclosure comprises at least one heterodimer comprising: a) a first polypeptide comprising: i) a WT-1 peptide epitope; ii) first MHC polypeptide; and iii) at least one immunomodulatory polypeptide; and b) a second polypeptide comprising: i) a second MHC polypeptide; and ii) at least one immunomodulatory polypeptide. In some cases, the at least one immunomodulatory polypeptide is a wild-type immunomodulatory polypeptide. In other cases, the at least one immunomodulatory polypeptide is a variant immunomodulatory polypeptide that exhibits reduced affinity for a co-immunomodulatory polypeptide, compared to the affinity of a corresponding wild-type immunomodulatory polypeptide for the co-immunomodulatory polypeptide. In some cases, a TMMP of the present disclosure comprises two immunomodulatory polypeptides where the two immunomodulatory polypeptides have the same amino acid sequence.

[0476] In some cases, a TMMP of the present disclosure comprises: a) a first polypeptide comprising, in order from N-terminus to C-terminus: i) a WT-1 peptide epitope; ii) a first MHC polypeptide; and iii) at least one immunomodulatory polypeptide; and b) a second polypeptide comprising, in order from N-terminus to C-terminus: i) a second MHC polypeptide; and ii) an Ig Fc polypeptide. In some cases, the first MHC polypeptide is a β2M polypeptide; and the second MHC polypeptide is an HLA heavy chain polypeptide. In some cases, the HLA heavy chain polypeptide is an HLA-A24 polypeptide. In some cases, the HLA heavy chain polypeptide is an HLA-A24 polypeptide with an A236C substitution. In some cases, the first polypeptide comprises, in order from N-terminus to C-terminus: i) a WT-1 peptide epitope; ii) a first MHC polypeptide; and iii) two immunomodulatory polypeptides, where the two immunomodulatory polypeptides have the same amino acid sequence. In some cases, the Ig Fc polypeptide is a human IgG1 Fe polypeptide. In some cases, the Ig Fc polypeptide is an IgG1 Fe polypeptide comprising L234A and L235A substitutions. In some cases, the first and the second polypeptides are disulfide linked to one another. In some cases, the immunomodulatory polypeptide is a variant IL-2 polypeptide comprising H16A and F42A substitutions. In some cases, the immunomodulatory polypeptide is a variant IL-2 polypeptide comprising H16T and F42A substitutions. In some cases, a peptide linker is between one or more of: i) the second MHC polypeptide and the Ig Fc polypeptide; ii) the epitope and the first MHC polypeptide; iii) the first MHC polypeptide and the immunomodulatory polypeptide; and (where the TMMP comprises two immunomodulatory polypeptides on the first polypeptide chain) iv) between the two immunomodulatory polypeptides. In some cases, the peptide linker comprises the amino acid sequence AAAGG (SEQ ID NO: 283). In some cases, the peptide linker comprises the amino acid sequence (GGGGS)n (SEQ ID NO: 284), where n is an integer from 1 to 10 (e.g., where n is 2, 3, or 4). In some cases, the WT-1 peptide epitope is CMTWNQMN (SEQ ID NO: 261). In some cases, the WT-1 peptide epitope is CYTWNQMNL (SEQ ID NO: 286).

[0477] In some cases, a TMMP of the present disclosure comprises: a) a first polypeptide comprising, in order from N-terminus to C-terminus: i) a WT-1 peptide epitope; and ii) a first MHC polypeptide; and b) a second polypeptide comprising, in order from N-terminus to C-terminus: i) at least one immunomodulatory polypeptide; ii) a second MHC polypeptide; and iii) an Ig Fe polypeptide. In some cases, the first MHC polypeptide is a β2M polypeptide; and the second MHC polypeptide is an HLA heavy chain polypeptide. In some cases, the HLA heavy chain polypeptide is an HLA-A24 polypeptide. In some cases, the HLA heavy chain polypeptide is an HLA-A24 polypeptide with an A236C substitution. In some cases, the second polypeptide comprises, in order from N-terminus to C-terminus: i) two immunomodulatory polypeptides, where the two immunomodulatory polypeptides have the same amino acid sequence; ii) a second MHC polypeptide; and iii) an Ig Fc polypeptide. In some cases, the Ig Fe polypeptide is a human IgG1 Fc polypeptide. In some cases, the Ig Fe polypeptide is an IgG1 Fc polypeptide comprising L234A and L235A substitutions. In some cases, the first and the second polypeptides are disulfide linked to one another. In some cases, the immunomodulatory polypeptide is a variant IL-2 polypeptide comprising H16A and F42A substitutions. In some cases, the immunomodulatory polypeptide is a variant IL-2 polypeptide comprising H16T and F42A substitutions. In some cases, a peptide linker is between one or more of: i) the second MHC polypeptide and the Ig Fc polypeptide; ii) the epitope and the first MHC polypeptide; iii) the first MHC polypeptide and the immunomodulatory polypeptide; and (where the TMMP comprises two immunomodulatory polypeptides on the second polypeptide chain) iv) between the two immunomodulatory polypeptides. In some cases, the peptide linker comprises the amino acid sequence AAAGG (SEQ ID NO: 283). In some cases, the peptide linker comprises the amino acid sequence (GGGGS)n (SEQ ID NO: 284), where n is an integer from 1 to 10 (e.g., where n is 2, 3, or 4). In some cases, the WT-1 peptide epitope is CMTWNQMN (SEQ ID NO: 261). In some cases, the WT-1 peptide epitope is CYTWNQMNL (SEQ ID NO: 286).

[0478] In some cases, a TMMP of the present disclosure comprises: a) a first polypeptide comprising, in order from N-terminus to C-terminus: i) a WT-1 peptide epitope; and ii) a first MHC polypeptide; and b) a second polypeptide comprising, in order from N-terminus to C-terminus: i) a second MHC polypeptide; ii) an Ig Fe polypeptide; and iii) at least one immunomodulatory polypeptide. In some cases, the first MHC polypeptide is a β2M polypeptide; and the second MHC polypeptide is an HLA heavy chain polypeptide. In some cases, the HLA heavy chain polypeptide is an HLA-A24 polypeptide. In some cases, the HLA heavy chain polypeptide is an HLA-A24 polypeptide with an A236C substitution. In some cases, the second polypeptide comprises, in order from N-terminus to C-terminus: i) a second MHC polypeptide; ii) an Ig Fc polypeptide; and iii) two immunomodulatory polypeptides, where the two immunomodulatory polypeptides have the same amino acid sequence. In some cases, the Ig Fc polypeptide is a human IgG1 Fe polypeptide. In some cases, the Ig Fc polypeptide is an IgG1 Fe polypeptide comprising L234A and L235A substitutions. In some cases, the first and the second polypeptides are disulfide linked to one another. In some cases, the immunomodulatory polypeptide is a variant IL-2 polypeptide comprising H16A and F42A substitutions. In some cases, the immunomodulatory polypeptide is a variant IL-2 polypeptide comprising H16T and F42A substitutions. In some cases, a peptide linker is between one or more of: i) the second MHC polypeptide and the Ig Fc polypeptide; ii) the epitope and the first MHC polypeptide; iii) the Ig Fc polypeptide and the immunomodulatory polypeptide; and (where the TMMP comprises two immunomodulatory polypeptides on the second polypeptide chain) iv) between the two immunomodulatory polypeptides. In some cases, the peptide linker comprises the amino acid sequence AAAGG (SEQ ID NO: 283). In some cases, the peptide linker comprises the amino acid sequence (GGGGS)n (SEQ ID NO: 284), where n is an integer from 1 to 10 (e.g., where n is 2, 3, or 4). In some cases, the WT-1 peptide epitope is CMTWNQMN (SEQ ID NO: 261). In some cases, the WT-1 peptide epitope is CYTWNQMNL (SEQ ID NO: 286).

[0479] In some cases, a TMMP of the present disclosure comprises: a) a first polypeptide comprising, in order from N-terminus to C-terminus: i) a WT-1 peptide epitope; and ii) a first MHC polypeptide; and b) a second polypeptide comprising, in order from N-terminus to C-terminus: i) at least one immunomodulatory polypeptide; ii) a second MHC polypeptide; and iii) an Ig Fc polypeptide. In some cases, the first MHC polypeptide is a β2M polypeptide; and the second MHC polypeptide is an HLA heavy chain polypeptide. In some cases, the HLA heavy chain polypeptide is an HLA-A24 polypeptide. In some cases, the HLA heavy chain polypeptide is an HLA-A24 polypeptide with an A236C substitution. In some cases, the Ig Fe polypeptide is a human IgG1 Fe polypeptide. In some cases, the Ig Fe polypeptide is an IgG1 Fc polypeptide comprising L234A and L235A substitutions. In some cases, the first and the second polypeptides are disulfide linked to one another. In some cases, the immunomodulatory polypeptide is a variant IL-2 polypeptide comprising H16A and F42A substitutions. In some cases, the immunomodulatory polypeptide is a variant IL-2 polypeptide comprising H16T and F42A substitutions. In some cases, the WT-1 peptide epitope is CMTWNQMN (SEQ ID NO: 261). In some cases, the WT-1 peptide epitope is CYTWNQMNL (SEQ ID NO: 286).

[0480] In some cases, a TMMP of the present disclosure comprises: a) a first polypeptide comprising, in order from N-terminus to C-terminus: i) at least one immunomodulatory polypeptide; ii) a WT-1 peptide epitope; and iii) a first MHC polypeptide; and b) a second polypeptide comprising, in order from N-terminus to C-terminus: i) a second MHC polypeptide; and ii) an Ig Fe polypeptide. In some cases, the first MHC polypeptide is a β2M polypeptide; and the second MHC polypeptide is an HLA heavy chain polypeptide. In some cases, the HLA heavy chain polypeptide is an HLA-A24 polypeptide. In some cases, the HLA heavy chain polypeptide is an HLA-A24 polypeptide with an A236C substitution. In some cases, the first polypeptide comprises, in order from N-terminus to C-terminus: i) two immunomodulatory polypeptides, where the two immunomodulatory polypeptides have the same amino acid sequence; ii) a WT-1 peptide epitope; and iii) a first MHC polypeptide. In some cases, the Ig Fe polypeptide is a human IgG1 Fe polypeptide. In some cases, the Ig Fe polypeptide is an IgG1 Fc polypeptide comprising L234A and L235A substitutions. In some cases, the first and the second polypeptides are disulfide linked to one another. In some cases, the immunomodulatory polypeptide is a variant IL-2 polypeptide comprising H16A and F42A substitutions. In some cases, the immunomodulatory polypeptide is a variant IL-2 polypeptide comprising H16T and F42A substitutions. In some cases, a peptide linker is between one or more of: i) the second MHC polypeptide and the Ig Fc polypeptide; ii) the epitope and the first MHC polypeptide; iii) the immunomodulatory polypeptide and the epitope; and (where the TMMP comprises two immunomodulatory polypeptides on the first polypeptide chain) iv) between the two immunomodulatory polypeptides. In some cases, the peptide linker comprises the amino acid sequence AAAGG (SEQ ID NO: 283). In some cases, the peptide linker comprises the amino acid sequence (GGGGS)n (SEQ ID NO: 284), where n is an integer from 1 to 10 (e.g., where n is 2, 3, or 4). In some cases, the WT-1 peptide epitope is CMTWNQMN (SEQ ID NO: 261). In some cases, the WT-1 peptide epitope is CYTWNQMNL (SEQ ID NO: 286).

[0481] In some cases, a TMMP of the present disclosure comprises: a) a first polypeptide comprising, in order from N-terminus to C-terminus: i) a WT-1 peptide epitope; and ii) a first MHC polypeptide; and b) a second polypeptide comprising, in order from N-terminus to C-terminus: i) a second MHC polypeptide; ii) at least one immunomodulatory polypeptide; and iii) an Ig Fc polypeptide. In some cases, the first MHC polypeptide is a β2M polypeptide; and the second MHC polypeptide is an HLA heavy chain polypeptide. In some cases, the HLA heavy chain polypeptide is an HLA-A24 polypeptide. In some cases, the HLA heavy chain polypeptide is an HLA-A24 polypeptide with an A236C substitution. In some cases, the second polypeptide comprises, in order from N-terminus to C-terminus: i) a second MHC polypeptide; ii) two immunomodulatory polypeptides, where the two immunomodulatory polypeptides have the same amino acid sequence; and iii) an Ig Fc polypeptide. In some cases, the Ig Fc polypeptide is a human IgG1 Fe polypeptide. In some cases, the Ig Fc polypeptide is an IgG1 Fc polypeptide comprising L234A and L235A substitutions. In some cases, the first and the second polypeptides are disulfide linked to one another. In some cases, the immunomodulatory polypeptide is a variant IL-2 polypeptide comprising H16A and F42A substitutions. In some cases, the immunomodulatory polypeptide is a variant IL-2 polypeptide comprising H16T and F42A substitutions. In some cases, a peptide linker is between one or more of: i) the second MHC polypeptide and the immunomodulatory polypeptide; ii) the immunomodulatory polypeptide and the Ig Fe polypeptide; iii) the epitope and the first MHC polypeptide; iii) the first MHC polypeptide and the immunomodulatory polypeptide; and (where the TMMP comprises two immunomodulatory polypeptides on the second polypeptide chain) iv) between the two immunomodulatory polypeptides. In some cases, the peptide linker comprises the amino acid sequence AAAGG (SEQ ID NO: 283). In some cases, the peptide linker comprises the amino acid sequence (GGGGS)n (SEQ ID NO: 284), where n is an integer from 1 to 10 (e.g., where n is 2, 3, or 4). In some cases, the WT-1 peptide epitope is CMTWNQMN (SEQ ID NO: 261). In some cases, the WT-1 peptide epitope is CYTWNQMNL (SEQ ID NO: 286).

[0482] As noted above, and as depicted schematically in FIG. 19, an immunomodulatory polypeptide (i.e., one or more immunomodulatory polypeptides) can be present in a TMMP of the present disclosure at any of a variety of positions. FIG. 19 depicts the position of two copies of a variant IL-2 polypeptide; however, the immunomodulatory polypeptide can be any of a variety of immunomodulatory polypeptide, as described herein. As depicted in FIG. 19, an immunomodulatory polypeptide can be: 1) N-terminal to the MHC class I heavy chain (position 1); 2) C-terminal to the MHC class I heavy chain and N-terminal to the Ig Fc polypeptide; in other words, between the MHC class I heavy chain and the Ig Fc polypeptide (position 2); 3) C-terminal to the Ig Fc polypeptide (position 3); 4) N-terminal to the peptide epitope (position 4); or 5) C=terminal to the β2M polypeptide (position 5). “Position 1” refers to a position of the immunomodulatory polypeptide on the same polypeptide chain as the class I MHC heavy chain and N-terminal to the class I MHC heavy chain; e.g., where the TMMP comprises: a) a first polypeptide comprising, in order from N-terminus to C-terminus: i) a peptide epitope (e.g., a WT-1 peptide); and ii) a β2M polypeptide; and b) a second polypeptide comprising, in order from N-terminus to C-terminus: i) one or more immunomodulatory polypeptides; and ii) a class I MHC heavy chain polypeptide. “Position 2” refers to a position of the immunomodulatory polypeptide on the same polypeptide chain as the class I MHC heavy chain and C-terminal to the class I MHC heavy chain, but not at the C-terminus of the polypeptide chain; e.g., where the TMMP comprises: a) a first polypeptide comprising, in order from N-terminus to C-terminus: i) a peptide epitope (e.g., a WT-1 peptide); and ii) a β2M polypeptide; and b) a second polypeptide comprising, in order from N-terminus to C-terminus: i) a class I MHC heavy chain polypeptide; ii) one or more immunomodulatory polypeptides; and iii) an Ig Fc polypeptide. “Position 3” refers to a position of the immunomodulatory polypeptide on the same polypeptide chain as the class I MHC heavy chain and at the C-terminus of the polypeptide chain; e.g., where the TMMP comprises: a) a first polypeptide comprising, in order from N-terminus to C-terminus: i) a peptide epitope (e.g., a WT-1 peptide); and ii) a β2M polypeptide; and b) a second polypeptide comprising, in order from N-terminus to C-terminus: i) a class I MHC heavy chain polypeptide; ii) an Ig Fc polypeptide; and iii) one or more immunomodulatory polypeptides. “Position 4” refers to a position of the immunomodulatory polypeptide on the same polypeptide chain as the R2M polypeptide and N-terminal to the peptide epitope and the β2M polypeptide; e.g., where the TMMP comprises: a) a first polypeptide comprising, in order from N-terminus to C-terminus: i) one or more immunomodulatory polypeptides; ii) a peptide epitope (e.g., a WT-1 peptide); and iii) a β2M polypeptide; and b) a second polypeptide comprising a class I MHC heavy chain polypeptide (e.g., a second polypeptide comprising, in order from N-terminus to C-terminus: i) a class I MHC heavy chain polypeptide; and ii) an Ig Fe polypeptide. “Position 5” refers to a position of the immunomodulatory polypeptide on the same polypeptide chain as the β2M polypeptide and C-terminal to the β2M polypeptide (e.g., at the C-terminus of the polypeptide chain); e.g., where the TMMP comprises: a) a first polypeptide comprising, in order from N-terminus to C-terminus: i) a peptide epitope (e.g., a WT-1 peptide); ii) a β2M polypeptide; and iii) one or more immunomodulatory polypeptides; and b) a second polypeptide comprising a class I MHC heavy chain polypeptide (e.g., a second polypeptide comprising, in order from N-terminus to C-terminus: i) a class I MHC heavy chain polypeptide; and ii) an Ig Fc polypeptide.

[0483] Furthermore, as discussed above and as depicted schematically in FIG. 18A-18C, the first polypeptide chain and the second polypeptide chain of a TMMP of the present disclosure can be linked by one or more disulfide bonds. For example, a TMMMP of the present disclosure can comprise: a) a first polypeptide chain comprising an β2M polypeptide having an R12C substitution; and b) a second polypeptide chain comprising a class I MHC heavy chain polypeptide having an A236C substitution; such that a disulfide bond forms between the Cys at position 12 of the β2M polypeptide in the first polypeptide chain and the Cys at position 236 of the class I MHC heavy chain polypeptide in the second polypeptide chain. As another example, a TMMMP of the present disclosure can comprise: a) a first polypeptide comprising, in order from N-terminus to C-terminus: i) a peptide epitope; ii) a peptide linker comprising a GCGG(G4S)n (SEQ ID NO:393) sequence, where n is 1, 2, or 3; and iii) a β2M polypeptide; and b) a second polypeptide comprising a class I MHC heavy chain polypeptide having a Y84C substitution, such that a disulfide bond forms between the Cys in the peptide linker in the first polypeptide chain and the Cys at position 84 of the class I MHC heavy chain polypeptide in the second polypeptide chain. In other examples, a TMMP of the present disclosure can comprise: a) a first polypeptide comprising, in order from N-terminus to C-terminus: i) a peptide epitope; ii) a peptide linker comprising a GCGG(G4S)˜ (SEQ ID NO:393) sequence, where n is 1, 2, or 3; and iii) a β2M polypeptide having an R12C substitution; and b) a second polypeptide comprising a class I MHC heavy chain polypeptide having a Y84C substitution and an A236C substitution; such that: i) a first disulfide bond forms between the Cys in the peptide linker in the first polypeptide chain and the Cys at position 84 of the class I MHC heavy chain polypeptide in the second polypeptide chain; and ii) a second disulfide bond forms between the Cys at position 12 of the β2M polypeptide in the first polypeptide chain and the Cys at position 236 of the class I MHC heavy chain polypeptide in the second polypeptide chain. For simplicity, the first disulfide bond is referred to as “G2C/Y84C”; and the second disulfide bond is referred to as “R12C/A236C.” A TMMP of the present disclosure can include: a) a G2C/Y84C disulfide bond and not an R12C/A236C disulfide bond; b) an R12C/A236C disulfide bond and not a G2C/Y84C disulfide bond; or c) a G2C/Y84C disulfide bond and an R12C/A236C disulfide bond.

[0484] A TMMP of the present disclosure can include: a) a G2C/Y84C disulfide bond and not an R12C/A236C disulfide bond; and b) at least one immunomodulatory polypeptide at position 1. A TMMP of the present disclosure can include: a) a G2C/Y84C disulfide bond and not an R12C/A236C disulfide bond; and b) at least one immunomodulatory polypeptide at position 2. A TMMP of the present disclosure can include: a) a G2C/Y84C disulfide bond and not an R12C/A236C disulfide bond; and b) at least one immunomodulatory polypeptide at position 3. A TMMP of the present disclosure can include: a) a G2C/Y84C disulfide bond and not an R12C/A236C disulfide bond; and b) at least one immunomodulatory polypeptide at position 4. A TMMP of the present disclosure can include: a) a G2C/Y84C disulfide bond and not an R12C/A236C disulfide bond; and b) at least one immunomodulatory polypeptide at position 5.

[0485] A TMMP of the present disclosure can include: a) an R12C/A236C disulfide bond and not a G2C/Y84C disulfide bond; and at least one immunomodulatory polypeptide at position 1. A TMMP of the present disclosure can include: a) an R12C/A236C disulfide bond and not a G2C/Y84C disulfide bond; and at least one immunomodulatory polypeptide at position 2. A TMMP of the present disclosure can include: a) an R12C/A236C disulfide bond and not a 02C/Y84C disulfide bond; and at least one immunomodulatory polypeptide at position 3. A TMMP of the present disclosure can include: a) an R12C/A236C disulfide bond and not a G2C/Y84C disulfide bond; and at least one immunomodulatory polypeptide at position 4. A TMMP of the present disclosure can include: a) an R12C/A236C disulfide bond and not a G2C/Y84C disulfide bond; and at least one immunomodulatory polypeptide at position 5.

[0486] A TMMP of the present disclosure can include: a) a G2C/Y84C disulfide bond and an R12C/A236C disulfide bond; and b) and at least one immunomodulatory polypeptide at position 1. A TMMP of the present disclosure can include: a) a G2C/Y84C disulfide bond and an R12C/A236C disulfide bond; and b) and at least one immunomodulatory polypeptide at position 2. A TMMP of the present disclosure can include: a) a G2C/Y84C disulfide bond and an R12C/A236C disulfide bond; and b) and at least one immunomodulatory polypeptide at position 3. A TMMP of the present disclosure can include: a) a G2C/Y84C disulfide bond and an R12C/A236C disulfide bond; and b) and at least one immunomodulatory polypeptide at position 4. A TMMP of the present disclosure can include: a) a G2C/Y84C disulfide bond and an R12C/A236C disulfide bond; and b) and at least one immunomodulatory polypeptide at position 5.

[0487] Non-limiting examples of amino acid sequences of first and second polypeptide chains of a TMMP of the present disclosure are provided in FIGS. 4A-4K and FIGS. 20A-20R.

[0488] In some cases, a TMMP of the present disclosure comprises: a) a first polypeptide chain comprising the amino acid sequence designated “2752” as depicted in FIG. 4D; and b) a second polypeptide chain comprising the amino acid sequence designated “3159” as depicted in FIG. 4C.

[0489] In some cases, a TMMP of the present disclosure comprises: a) a first polypeptide chain comprising the amino acid sequence designated “2753” as depicted in FIG. 4E; and b) a second polypeptide chain comprising the amino acid sequence designated “3159” as depicted in FIG. 4C. Such a TMMP comprises: a) an immunomodulatory polypeptide at position 3 as depicted in FIG. 19; and b) an R12C/A236C disulfide bond (but not a G2C/Y84C disulfide bond).

[0490] In some cases, a TMMP of the present disclosure comprises: a) a first polypeptide chain comprising the amino acid sequence designated “2752” as depicted in FIG. 4D; and b) a second polypeptide chain comprising the amino acid sequence designated “2750” as depicted in FIG. 4B.

[0491] In some cases, a TMMP of the present disclosure comprises: a) a first polypeptide chain comprising the amino acid sequence designated “2753” as depicted in FIG. 4E; and b) a second polypeptide chain comprising the amino acid sequence designated “2750” as depicted in FIG. 4B. Such a TMMP comprises: a) an immunomodulatory polypeptide at position 1 as depicted in FIG. 19; and b) an R12C/A236C disulfide bond (but not a G2C/Y84C disulfide bond).

[0492] In some cases, a TMMP of the present disclosure comprises: a) a first polypeptide chain comprising the amino acid sequence designated “2752” as depicted in FIG. 4D; and h) a second polypeptide chain comprising the amino acid sequence designated “3158” as depicted in FIG. 4A.

[0493] In some cases, a TMMP of the present disclosure comprises: a) a first polypeptide chain comprising the amino acid sequence designated “2753” as depicted in FIG. 4E; and b) a second polypeptide chain comprising the amino acid sequence designated “3158” as depicted in FIG. 4A.

[0494] In some cases, a TMMP of the present disclosure comprises: a) a first polypeptide chain comprising the amino acid sequence designated “2380” as depicted in FIG. 14B; and b) a second polypeptide chain comprising the amino acid sequence designated “1715” as depicted in FIG. 14A.

[0495] In some cases, a TMMP of the present disclosure comprises: a) a first polypeptide chain comprising the amino acid sequence designated “2381” as depicted in FIG. 14B; and b) a second polypeptide chain comprising the amino acid sequence designated “1715” as depicted in FIG. 14A.

[0496] In some cases, a TMMP of the present disclosure comprises: a) a first polypeptide chain comprising the amino acid sequence designated “2380” as depicted in FIG. 14B; and b) a second polypeptide chain comprising the amino acid sequence designated “2405” as depicted in FIG. 14D.

[0497] In some cases, a TMMP of the present disclosure comprises: a) a first polypeptide chain comprising the amino acid sequence designated “2381,” as depicted in FIG. 14B; and b) a second polypeptide chain comprising the amino acid sequence designated “2405” as depicted in FIG. 14D. In some cases, a TMMP of the present disclosure comprises: a) a first polypeptide chain comprising the amino acid sequence designated “2762” as depicted in FIG. 14F; and b) a second polypeptide chain comprising the amino acid sequence designated “2405” as depicted in FIG. 14D.

[0498] In some cases, a TMMP of the present disclosure comprises: a) a first polypeptide chain comprising the amino acid sequence designated “2380” as depicted in FIG. 14B; and b) a second polypeptide chain comprising the amino acid sequence designated “1380” as depicted in FIG. 14E.

[0499] In some cases, a TMMP of the present disclosure comprises: a) a first polypeptide chain comprising the amino acid sequence designated “2381” as depicted in FIG. 14B; and b) a second polypeptide chain comprising the amino acid sequence designated “1380” as depicted in FIG. 14E.

[0500] In some cases, a TMMP of the present disclosure comprises: a) a first polypeptide chain comprising the amino acid sequence designated “3592” as depicted in FIG. 20A; and b) a second polypeptide chain comprising the amino acid sequence designated “3188” as depicted in FIG. 20H. Such a TMMP comprises: a) an immunomodulatory polypeptide at position 1 as depicted in FIG. 19; and b) both a G2C/Y84C disulfide bond and an R12C/A236C disulfide bond.

[0501] In some cases, a TMMP of the present disclosure comprises: a) a first polypeptide chain comprising the amino acid sequence designated “3425” as depicted in FIG. 20B; and b) a second polypeptide chain comprising the amino acid sequence designated “3188” as depicted in FIG. 20H. Such a TMMP comprises: a) an immunomodulatory polypeptide at position 3 as depicted in FIG. 19; and b) both a G2C/Y84C disulfide bond and an R12C/A236C disulfide bond.

[0502] In some cases, a TMMP of the present disclosure comprises: a) a first polypeptide chain comprising the amino acid sequence designated “3196” as depicted in FIG. 20C; and b) a second polypeptide chain comprising the amino acid sequence designated “3604” as depicted in FIG. 20I. Such a TMMP comprises: a) an immunomodulatory polypeptide at position 5 as depicted in FIG. 19; and b) both a G2C/Y84C disulfide bond and an R12C/A236C disulfide bond.

[0503] In some cases, a TMMP of the present disclosure comprises: a) a first polypeptide chain comprising the amino acid sequence designated “2764” as depicted in FIG. 20D; and h) a second polypeptide chain comprising the amino acid sequence designated “3603” as depicted in FIG. 20J. Such a TMMP comprises: a) an immunomodulatory polypeptide at position 5 as depicted in FIG. 19; and b) an R12C/A236C disulfide bond (but not a G2C/Y84C disulfide bond).

[0504] In some cases, a TMMP of the present disclosure comprises: a) a first polypeptide chain comprising the amino acid sequence designated “3593” as depicted in FIG. 20E; and b) a second polypeptide chain comprising the amino acid sequence designated “3192” as depicted in FIG. 20K. Such a TMMP comprises: a) an immunomodulatory polypeptide at position 1 as depicted in FIG. 19; and b) a G2C/Y84C disulfide bond (but not an R12C/A236C disulfide bond).

[0505] In some cases, a TMMP of the present disclosure comprises: a) a first polypeptide chain comprising the amino acid sequence designated “3426” as depicted in FIG. 20F; and b) a second polypeptide chain comprising the amino acid sequence designated “3192” as depicted in FIG. 20K. Such a TMMP comprises: a) an immunomodulatory polypeptide at position 3 as depicted in FIG. 19; and b) a 02C/Y84C disulfide bond (but not an R12C/A236C disulfide bond).

[0506] In some cases, a TMMP of the present disclosure comprises: a) a first polypeptide chain comprising the amino acid sequence designated “3197” as depicted in FIG. 20G; and b) a second polypeptide chain comprising the amino acid sequence designated “3605” as depicted in FIG. 20L. Such a TMMP comprises: a) an immunomodulatory polypeptide at position 5 as depicted in FIG. 19; and b) a G2C/Y84C disulfide bond (but not an R12C/A236C disulfide bond).

[0507] In some cases, a TMMP of the present disclosure comprises: a) a first polypeptide chain comprising the amino acid sequence designated “3592” as depicted in FIG. 20A; and b) a second polypeptide chain comprising the amino acid sequence designated “3529” as depicted in FIG. 20M. Such a TMMP comprises: a) an immunomodulatory polypeptide at position 1 as depicted in FIG. 19; and b) both a G2C/Y84C disulfide bond and an R12C/A236C disulfide bond.

[0508] In some cases, a TMMP of the present disclosure comprises: a) a first polypeptide chain comprising the amino acid sequence designated “3425” as depicted in FIG. 20B; and b) a second polypeptide chain comprising the amino acid sequence designated “3529” as depicted in FIG. 20M. Such a TMMP comprises: a) an immunomodulatory polypeptide at position 3 as depicted in FIG. 19; and b) both a G2C/Y84C disulfide bond and an R12C/A236C disulfide bond; and also comprises a WT1 239-247 (Q240Y) epitope.

[0509] In some cases, a TMMP of the present disclosure comprises: a) a first polypeptide chain comprising the amino acid sequence designated “3196” as depicted in FIG. 20C; and b) a second polypeptide chain comprising the amino acid sequence designated “3709” as depicted in FIG. 20N. Such a TMMP comprises: a) an immunomodulatory polypeptide at position 3 as depicted in FIG. 19; and b) both a G2C/Y84C disulfide bond and an R12C/A236C disulfide bond.

[0510] In some cases, a TMMP of the present disclosure comprises: a) a first polypeptide chain comprising the amino acid sequence designated “2750” as depicted in FIG. 4B; and b) a second polypeptide chain comprising the amino acid sequence designated “3528” as depicted in FIG. 20O. Such a TMMP comprises: a) an immunomodulatory polypeptide at position 1 as depicted in FIG. 19; and b) an R12C/A236C disulfide bond (but not a G2C/Y84C disulfide bond).

[0511] In some cases, a TMMP of the present disclosure comprises: a) a first polypeptide chain comprising the amino acid sequence designated “3159” as depicted in FIG. 4C; and b) a second polypeptide chain comprising the amino acid sequence designated “3528” as depicted in FIG. 20O. Such a TMMP comprises: a) an immunomodulatory polypeptide at position 3 as depicted in FIG. 19; and b) an R12C/A236C disulfide bond (but not a G2C/Y84C disulfide bond).

[0512] In some cases, a TMMP of the present disclosure comprises: a) a first polypeptide chain comprising the amino acid sequence designated “2764” as depicted in FIG. 20D; and b) a second polypeptide chain comprising the amino acid sequence designated “3708” as depicted in FIG. 20P. Such a TMMP comprises: a) an immunomodulatory polypeptide at position 5 as depicted in FIG. 19; and b) an R12C/A236C disulfide bond (but not a G2C/Y84C disulfide bond).

[0513] In some cases, a TMMP of the present disclosure comprises: a) a first polypeptide chain comprising the amino acid sequence designated “3593” as depicted in FIG. 20E; and b) a second polypeptide chain comprising the amino acid sequence designated “3530” as depicted in FIG. 20Q. Such a TMMP comprises: a) an immunomodulatory polypeptide at position 1 as depicted in FIG. 19; and b) a G2C/Y84C disulfide bond (but not an R12C/A236C disulfide bond).

[0514] In some cases, a TMMP of the present disclosure comprises: a) a first polypeptide chain comprising the amino acid sequence designated “3426” as depicted in FIG. 20F; and b) a second polypeptide chain comprising the amino acid sequence designated “3530” as depicted in FIG. 20Q. Such a TMMP comprises: a) an immunomodulatory polypeptide at position 3 as depicted in FIG. 19; and b) a G2C/Y84C disulfide bond (but not an R12C/A236C disulfide bond).

[0515] In some cases, a TMMP of the present disclosure comprises: a) a first polypeptide chain comprising the amino acid sequence designated “3197” as depicted in FIG. 20G; and b) a second polypeptide chain comprising the amino acid sequence designated “3710” as depicted in FIG. 20R. Such a TMMP comprises: a) an immunomodulatory polypeptide at position 5 as depicted in FIG. 19; and b) a G2C/Y84C disulfide bond (but not an R12C/A236C disulfide bond).

[0516] In some cases, a TMMP of the present disclosure comprises: a) a first polypeptide chain comprising the amino acid sequence designated “3426” as depicted in FIG. 20F; and h) a second polypeptide chain comprising the amino acid sequence designated “3529” as depicted in FIG. 20M. Such a TMMP comprises: a) an immunomodulatory polypeptide at position 3 as depicted in FIG. 19; and b) a G2C/Y84C disulfide bond (but not an R12C/A236C disulfide bond), and also includes a WT1 239-247 (Q240Y) epitope.

[0517] In some cases, a TMMP of the present disclosure comprises: a) a first polypeptide chain comprising the amino acid sequence designated “3425” as depicted in FIG. 20B; and b) a second polypeptide chain comprising the amino acid sequence designated “3528” as depicted in FIG. 20O. Such a TMMP comprises: a) an immunomodulatory polypeptide at position 3 as depicted in FIG. 19; and b) an R12C/A236C disulfide bond (but not a G2C/Y84C disulfide bond) and also includes a WT1 239-247 (Q240Y) epitope.

[0518] In some cases, a TMMP of the present disclosure comprises: a) a first polypeptide chain comprising the amino acid sequence designated “3425” as depicted in FIG. 20B; and b) a second polypeptide chain comprising the amino acid sequence designated “3530” as depicted in FIG. 20Q. Such a TMMP comprises: a) an immunomodulatory polypeptide at position 3 as depicted in FIG. 19; and b) a G2C/Y84C disulfide bond (but not an R12C/A236C disulfide bond), and also includes a WT1 239-247 (Q240Y) epitope.

[0519] In some cases, a TMMP of the present disclosure comprises: a) a first polypeptide chain comprising the amino acid sequence designated “3159” as depicted in FIG. 4C; and b) a second polypeptide chain comprising the amino acid sequence designated “3188” as depicted in FIG. 20H. Such a TMMP comprises: a) an immunomodulatory polypeptide at position 3 as depicted in FIG. 19; and b) an R12C/A236C disulfide bond (but not a G2C/Y84C disulfide bond), and also includes a WT1 235-243 (M236Y) epitope.

### Methods of Generating a Multimeric T-Cell Modulatory Polypeptide

[0520] The present disclosure provides a method of obtaining a TMMP comprising one or more variant immunomodulatory polypeptides that exhibit lower affinity for a cognate co-immunomodulatory polypeptide compared to the affinity of the corresponding parental wild-type immunomodulatory polypeptide for the co-immunomodulatory polypeptide, the method comprising: A) generating a library of TMMPs comprising a plurality of members, wherein each member comprises: a) a first polypeptide comprising: i) an epitope; and ii) a first major MHC polypeptide; and b) a second polypeptide comprising: i) a second MHC polypeptide; and ii) optionally an Ig Fe polypeptide or a non-Ig scaffold, wherein each member comprises a different variant immunomodulatory polypeptide on the first polypeptide, the second polypeptide, or both the first and the second polypeptide; B) determining the affinity of each member of the library for a cognate co-immunomodulatory polypeptide; and C) selecting a member that exhibits reduced affinity for the cognate co-immunomodulatory polypeptide. In some cases, the affinity is determined by bio-layer interferometry (BLI) using purified TMMP library members and the cognate co-immunomodulatory polypeptide. BLI methods are well known to those skilled in the art. A BLI assay is described above. See, e.g., Lad et al. (2015) J. Biomol. Screen. 20(4): 498-507; and Shah and Duncan (2014) J. Vis. Exp. 18:e51383.

[0521] The present disclosure provides a method of obtaining a TMMP that exhibits selective binding to a T-cell, the method comprising: A) generating a library of TMMPs comprising a plurality of members, wherein each member comprises: a) a first polypeptide comprising: i) an epitope; and ii) a first MHC polypeptide; and b) a second polypeptide comprising: i) a second MHC polypeptide; and ii) optionally an immunoglobulin (Ig) Fc polypeptide or a non-Ig scaffold, wherein each member comprises a different variant immunomodulatory polypeptide on the first polypeptide, the second polypeptide, or both the first and the second polypeptide, wherein the variant immunomodulatory polypeptide differs in amino acid sequence by from 1 amino acid to 10 amino acids from a parental wild-type immunomodulatory polypeptide; B) contacting a TMMP library member with a target T-cell expressing on its surface: i) a cognate co-immunomodulatory polypeptide that binds the parental wild-type immunomodulatory polypeptide; and ii) a T-cell receptor that binds to the epitope, wherein the TMMP library member comprises an epitope tag, such that the TMMP library member binds to the target T-cell; C) contacting the TMMP library member bound to the target T-cell with a fluorescently labeled binding agent that binds to the epitope tag, generating a TMMP library member/target T-cell/binding agent complex; D) measuring the mean fluorescence intensity (MFI) of the TMMP library member/target T-cell/binding agent complex using flow cytometry, wherein the MFI measured over a range of concentrations of the TMMP library member provides a measure of the affinity and apparent avidity; and E) selecting a TMMP library member that selectively binds the target T cell, compared to binding of the TMMP library member to a control T cell that comprises: i) the cognate co-immunomodulatory polypeptide that binds the parental wild-type immunomodulatory polypeptide; and ii) a T-cell receptor that binds to an epitope other than the epitope present in the TMMP library member. In some cases, a TMMP library member that is identified as selectively binds to a target T cell is isolated from the library.

[0522] In some cases, a parental wild-type immunomodulatory polypeptide and cognate immunomodulatory polypeptide pairs are selected from:

[0523] IL-2 and IL-2 receptor;

[0524] 4-1BBL and 4-1BB;

[0525] PD-L1 and PD-1;

[0526] CD70 and CD27;

[0527] TGFβ and TGFβ receptor;

[0528] CD80 and CD28;

[0529] CD86 and CD28;

[0530] OX40L and OX40;

[0531] FasL and Fas;

[0532] ICOS-L and ICOS;

[0533] ICAM and LFA-1;

[0534] JAG1 and Notch;

[0535] JAG1 and CD46;

[0536] CD80 and CTLA4; and

[0537] CD86 and CTLA4.

[0538] The present disclosure provides a method of obtaining a TMMP comprising one or more variant immunomodulatory polypeptides that exhibit reduced affinity for a cognate co-immunomodulatory polypeptide compared to the affinity of the corresponding parental wild-type immunomodulatory polypeptide for the co-immunomodulatory polypeptide, the method comprising selecting, from a library of TMMPs comprising a plurality of members, a member that exhibits reduced affinity for the cognate co-immunomodulatory polypeptide, wherein the plurality of member comprises: a) a first polypeptide comprising: i) an epitope; and ii) a first MHC polypeptide; and b) a second polypeptide comprising: i) a second MHC polypeptide; and ii) optionally an Ig Fe polypeptide or a non-Ig scaffold, wherein the members of the library comprise a plurality of variant immunomodulatory polypeptide present in the first polypeptide, the second polypeptide, or both the first and the second polypeptide. In some cases, the selecting step comprises determining the affinity, using bio-layer interferometry, of binding between TMMP library members and the cognate co-immunomodulatory polypeptide. In some cases, the TMMP is as described above.

[0539] In some cases, the method further comprises: a) contacting the selected TMMP library member with a target T-cell expressing on its surface: i) a cognate co-immunomodulatory polypeptide that binds the parental wild-type immunomodulatory polypeptide; and ii) a T-cell receptor that binds to the epitope, wherein the TMMP library member comprises an epitope tag, such that the TMMP library member binds to the target T-cell; b) contacting the selected TMMP library member bound to the target T-cell with a fluorescently labeled binding agent that binds to the epitope tag, generating a selected TMMP library member/target T-cell/binding agent complex; and c) measuring the mean fluorescence intensity (MFI) of the selected TMMP library member/target T-cell/binding agent complex using flow cytometry, wherein the MFI measured over a range of concentrations of the selected TMMP library member provides a measure of the affinity and apparent avidity. A selected TMMP library member that selectively binds the target T cell, compared to binding of the TMMP library member to a control T cell that comprises: i) the cognate co-immunomodulatory polypeptide that binds the parental wild-type immunomodulatory polypeptide; and ii) a T-cell receptor that binds to an epitope other than the epitope present in the TMMP library member, is identified as selectively binding to the target T cell. In some cases, the binding agent is an antibody specific for the epitope tag. In some cases, the variant immunomodulatory polypeptide comprises from 1 to 20 amino acid substitutions (e.g., 1, 2, 3, 4, 5, 6, 7, 8, 9, 10, 11, 12, 13, 14, 15, 16, 17, 18, 19, or 20 amino acid substitutions) compared to the corresponding parental wild-type immunomodulatory polypeptide. In some cases, the TMMP comprises two variant immunomodulatory polypeptides. In some cases, the two variant immunomodulatory polypeptides comprise the same amino acid sequence. In some cases, the first polypeptide comprises one of the two variant immunomodulatory polypeptides and wherein the second polypeptide comprises the second of the two variant immunomodulatory polypeptides. In some cases, the two variant immunomodulatory polypeptides are on the same polypeptide chain of the TMMP. In some cases, the two variant immunomodulatory polypeptides are on the first polypeptide of the TMMP. In some cases, the two variant immunomodulatory polypeptides are on the second polypeptide of the TMMP.

[0540] In some cases, the method further comprises isolating the selected TMMP library member from the library. In some cases, the method further comprises providing a nucleic acid comprising a nucleotide sequence encoding the selected TMMP library member. In some cases, the nucleic acid is present in a recombinant expression vector. In some cases, the nucleotide sequence is operably linked to a transcriptional control element that is functional in a eukaryotic cell. In some cases, the method further comprises introducing the nucleic acid into a eukaryotic host cell, and culturing the cell in a liquid medium to synthesize the encoded selected TMMP library member in the cell. In some cases, the method further comprises isolating the synthesized selected TMMP library member from the cell or from liquid culture medium comprising the cell. In some cases, the selected TMMP library member comprises an Ig Fc polypeptide. In some cases, the method further comprises conjugating a drug to the Ig Fc polypeptide. In some cases, the drug is a cytotoxic agent is selected from maytansinoid, benzodiazepine, taxoid, CC-1065, duocarmycin, a duocarmycin analog, calicheamicin, dolastatin, a dolastatin analog, auristatin, tomaymycin, and leptomycin, or a pro-drug of any one of the foregoing. In some cases, the drug is a retinoid. In some cases, the parental wild-type immunomodulatory polypeptide and the cognate immunomodulatory polypeptides are selected from: IL-2 and IL-2 receptor; 4-1BBL and 4-1BB; PD-L1 and PD-1; CD70 and CD27; TGFβ and TGFβ receptor; CD80 and CD28; CD86 and CD28; OX40L and OX40; FasL and Fas; ICOS-L and ICOS; ICAM and LFA-1; JAG1 and Notch; JAG1 and CD46; CD80 and CTLA4; and CD86 and CTLA4.

[0541] The present disclosure provides a method of obtaining a TMMP comprising one or more variant immunomodulatory polypeptides that exhibit reduced affinity for a cognate co-immunomodulatory polypeptide compared to the affinity of the corresponding parental wild-type immunomodulatory polypeptide for the co-immunomodulatory polypeptide, the method comprising: A) providing a library of TMMPs comprising a plurality of members, wherein the plurality of member comprises: a) a first polypeptide comprising: i) an epitope; and ii) a first MHC polypeptide; and b) a second polypeptide comprising: i) a second MHC polypeptide; and ii) optionally an Ig Fe polypeptide or a non-Ig scaffold, wherein the members of the library comprise a plurality of variant immunomodulatory polypeptide present in the first polypeptide, the second polypeptide, or both the first and the second polypeptide; and B) selecting from the library a member that exhibits reduced affinity for the cognate co-immunomodulatory polypeptide. In some cases, the selecting step comprises determining the affinity, using bio-layer interferometry, of binding between TMMP library members and the cognate co-immunomodulatory polypeptide. In some cases, the TMMP is as described above.

[0542] In some cases, the method further comprises: a) contacting the selected TMMP library member with a target T-cell expressing on its surface: i) a cognate co-immunomodulatory polypeptide that binds the parental wild-type immunomodulatory polypeptide; and ii) a T-cell receptor that binds to the epitope, wherein the TMMP library member comprises an epitope tag, such that the TMMP library member binds to the target T-cell; b) contacting the selected TMMP library member bound to the target T-cell with a fluorescently labeled binding agent that binds to the epitope tag, generating a selected TMMP library member/target T-cell/binding agent complex; and c) measuring the mean fluorescence intensity (MFI) of the selected TMMP library member/target T-cell/binding agent complex using flow cytometry, wherein the MFI measured over a range of concentrations of the selected TMMP library member provides a measure of the affinity and apparent avidity. A selected TMMP library member that selectively binds the target T cell, compared to binding of the TMMP library member to a control T cell that comprises: i) the cognate co-immunomodulatory polypeptide that binds the parental wild-type immunomodulatory polypeptide; and ii) a T-cell receptor that binds to an epitope other than the epitope present in the TMMP library member, is identified as selectively binding to the target T cell. In some cases, the binding agent is an antibody specific for the epitope tag. In some cases, the variant immunomodulatory polypeptide comprises from 1 to 20 amino acid substitutions (e.g., 1, 2, 3, 4, 5, 6, 7, 8, 9, 10, 11, 12, 13, 14, 15, 16, 17, 18, 19, or 20 amino acid substitutions) compared to the corresponding parental wild-type immunomodulatory polypeptide. In some cases, the TMMP comprises two variant immunomodulatory polypeptides. In some cases, the two variant immunomodulatory polypeptides comprise the same amino acid sequence. In some cases, the first polypeptide comprises one of the two variant immunomodulatory polypeptides and wherein the second polypeptide comprises the second of the two variant immunomodulatory polypeptides. In some cases, the two variant immunomodulatory polypeptides are on the same polypeptide chain of the TMMP. In some cases, the two variant immunomodulatory polypeptides are on the first polypeptide of the TMMP. In some cases, the two variant immunomodulatory polypeptides are on the second polypeptide of the TMMP.

[0543] In some cases, the method further comprises isolating the selected TMMP library member from the library. In some cases, the method further comprises providing a nucleic acid comprising a nucleotide sequence encoding the selected TMMP library member. In some cases, the nucleic acid is present in a recombinant expression vector. In some cases, the nucleotide sequence is operably linked to a transcriptional control element that is functional in a eukaryotic cell. In some cases, the method further comprises introducing the nucleic acid into a eukaryotic host cell, and culturing the cell in a liquid medium to synthesize the encoded selected TMMP library member in the cell. In some cases, the method further comprises isolating the synthesized selected TMMP library member from the cell or from liquid culture medium comprising the cell. In some cases, the selected TMMP library member comprises an Ig Fc polypeptide. In some cases, the method further comprises conjugating a drug to the Ig Fc polypeptide. In some cases, the drug is a cytotoxic agent is selected from maytansinoid, benzodiazepine, taxoid, CC-1065, duocarmycin, a duocarmycin analog, calicheamicin, dolastatin, a dolastatin analog, auristatin, tomaymycin, and leptomycin, or a pro-drug of any one of the foregoing. In some cases, the drug is a retinoid. In some cases, the parental wild-type immunomodulatory polypeptide and the cognate immunomodulatory polypeptides are selected from IL-2 and IL-2 receptor; 4-1BBL and 4-1BB; PD-L1 and PD-1; TGFβ and TGFβ receptor; CD80 and CD28; CD86 and CD28; OX40L and OX40; FasL and Fas; ICOS-L and ICOS; CD70 and CD27; ICAM and LFA-1; JAG1 and Notch; JAG1 and CD46; CD80 and CTLA4; and CD86 and CTLA4.

### Nucleic Acids

[0544] The present disclosure provides a nucleic acid comprising a nucleotide sequence encoding a TMMP of the present disclosure. The present disclosure provides a nucleic acid comprising a nucleotide sequence encoding a TMMP of the present disclosure.

[0545] The present disclosure provides nucleic acids comprising nucleotide sequences encoding a TMMP of the present disclosure. In some cases, the individual polypeptide chains of a TMMP of the present disclosure are encoded in separate nucleic acids. In some cases, all polypeptide chains of a TMMP of the present disclosure are encoded in a single nucleic acid. In some cases, a first nucleic acid comprises a nucleotide sequence encoding a first polypeptide of a TMMP of the present disclosure; and a second nucleic acid comprises a nucleotide sequence encoding a second polypeptide of a TMMP of the present disclosure. In some cases, single nucleic acid comprises a nucleotide sequence encoding a first polypeptide of a TMMP of the present disclosure and a second polypeptide of a TMMP of the present disclosure.

### Separate Nucleic Acids Encoding Individual Polypeptide Chains of a Multimeric Polypeptide

[0546] The present disclosure provides nucleic acids comprising nucleotide sequences encoding a TMMP of the present disclosure. As noted above, in some cases, the individual polypeptide chains of a TMMP of the present disclosure are encoded in separate nucleic acids. In some cases, nucleotide sequences encoding the separate polypeptide chains of a TMMP of the present disclosure are operably linked to transcriptional control elements, e.g., promoters, such as promoters that are functional in a eukaryotic cell, where the promoter can be a constitutive promoter or an inducible promoter.

[0547] The present disclosure provides a first nucleic acid and a second nucleic acid, where the first nucleic acid comprises a nucleotide sequence encoding a first polypeptide of a TMMP of the present disclosure, where the first polypeptide comprises, in order from N-terminus to C-terminus: a) an epitope (e.g., a T-cell epitope); h) a first MHC polypeptide; and c) an immunomodulatory polypeptide (e.g., a reduced-affinity variant, as described above); and where the second nucleic acid comprises a nucleotide sequence encoding a second polypeptide of a TMMP of the present disclosure, where the second polypeptide comprises, in order from N-terminus to C-terminus: a) a second MHC polypeptide; and b) an Ig Fe polypeptide. Suitable T-cell epitopes, MHC polypeptides, immunomodulatory polypeptides, and Ig Fc polypeptides, are described above. In some cases, the nucleotide sequences encoding the first and the second polypeptides are operably linked to transcriptional control elements. In some cases, the transcriptional control element is a promoter that is functional in a eukaryotic cell. In some cases, the nucleic acids are present in separate expression vectors.

[0548] The present disclosure provides a first nucleic acid and a second nucleic acid, where the first nucleic acid comprises a nucleotide sequence encoding a first polypeptide of a TMMP of the present disclosure, where the first polypeptide comprises, in order from N-terminus to C-terminus: a) an epitope (e.g., a T-cell epitope); and b) a first MHC polypeptide; and where the second nucleic acid comprises a nucleotide sequence encoding a second polypeptide of a TMMP of the present disclosure, where the second polypeptide comprises, in order from N-terminus to C-terminus: a) an immunomodulatory polypeptide (e.g., a reduced-affinity variant as described above); h) a second MHC polypeptide; and c) an Ig Fc polypeptide. Suitable T-cell epitopes, MHC polypeptides, immunomodulatory polypeptides, and Ig Fe polypeptides, are described above. In some cases, the nucleotide sequences encoding the first and the second polypeptides are operably linked to transcriptional control elements. In some cases, the transcriptional control element is a promoter that is functional in a eukaryotic cell. In some cases, the nucleic acids are present in separate expression vectors.

### Nucleic Acid Encoding Two or More Polypeptides Present in a Multimeric Polypeptide

[0549] The present disclosure provides a nucleic acid comprising nucleotide sequences encoding at least the first polypeptide and the second polypeptide of a TMMP of the present disclosure. In some cases, where a TMMP of the present disclosure includes a first, second, and third polypeptide, the nucleic acid includes a nucleotide sequence encoding the first, second, and third polypeptides. In some cases, the nucleotide sequences encoding the first polypeptide and the second polypeptide of a TMMP of the present disclosure includes a proteolytically cleavable linker interposed between the nucleotide sequence encoding the first polypeptide and the nucleotide sequence encoding the second polypeptide. In some cases, the nucleotide sequences encoding the first polypeptide and the second polypeptide of a TMMP of the present disclosure includes an internal ribosome entry site (IRES) interposed between the nucleotide sequence encoding the first polypeptide and the nucleotide sequence encoding the second polypeptide. In some cases, the nucleotide sequences encoding the first polypeptide and the second polypeptide of a TMMP of the present disclosure includes a ribosome skipping signal (or cis-acting hydrolase element, CHYSEL (SEQ ID NO: 394)) interposed between the nucleotide sequence encoding the first polypeptide and the nucleotide sequence encoding the second polypeptide. Examples of nucleic acids are described below, where a proteolytically cleavable linker is provided between nucleotide sequences encoding the first polypeptide and the second polypeptide of a TMMP of the present disclosure; in any of these embodiments, an IRES or a ribosome skipping signal can be used in place of the nucleotide sequence encoding the proteolytically cleavable linker.

[0550] In some cases, a first nucleic acid (e.g., a recombinant expression vector, an mRNA, a viral RNA, etc.) comprises a nucleotide sequence encoding a first polypeptide chain of a TMMP of the present disclosure; and a second nucleic acid (e.g., a recombinant expression vector, an mRNA, a viral RNA, etc.) comprises a nucleotide sequence encoding a second polypeptide chain of a TMMP of the present disclosure. In some cases, the nucleotide sequence encoding the first polypeptide, and the second nucleotide sequence encoding the second polypeptide, are each operably linked to transcriptional control elements, e.g., promoters, such as promoters that are functional in a eukaryotic cell, where the promoter can be a constitutive promoter or an inducible promoter.

[0551] The present disclosure provides a nucleic acid comprising a nucleotide sequence encoding a recombinant polypeptide, where the recombinant polypeptide comprises, in order from N-terminus to C-terminus: a) an epitope (e.g., a T-cell epitope); h) a first MHC polypeptide; c) an immunomodulatory polypeptide (e.g., a reduced-affinity variant as described above); d) a proteolytically cleavable linker; e) a second MHC polypeptide; and f) an immunoglobulin (Ig) Fe polypeptide. The present disclosure provides a nucleic acid comprising a nucleotide sequence encoding a recombinant polypeptide, where the recombinant polypeptide comprises, in order from N-terminus to C-terminus: a) a first leader peptide; b) the epitope; c) the first MHC polypeptide; d) the immunomodulatory polypeptide (e.g., a reduced-affinity variant as described above); e) the proteolytically cleavable linker; f) a second leader peptide; g) the second MHC polypeptide; and h) the Ig Fc polypeptide. The present disclosure provides a nucleic acid comprising a nucleotide sequence encoding a recombinant polypeptide, where the recombinant polypeptide comprises, in order from N-terminus to C-terminus: a) an epitope; b) a first MHC polypeptide; c) a proteolytically cleavable linker; d) an immunomodulatory polypeptide (e.g., a reduced-affinity variant as described above); c) a second MHC polypeptide; and f) an Ig Fe polypeptide. In some cases, the first leader peptide and the second leader peptide are a β2-M leader peptide. In some cases, the nucleotide sequence is operably linked to a transcriptional control element. In some cases, the transcriptional control element is a promoter that is functional in a eukaryotic cell.

[0552] Suitable MHC polypeptides are described above. In some cases, the first MHC polypeptide is a β2-microglobulin polypeptide; and wherein the second MHC polypeptide is an MHC class I heavy chain polypeptide. In some cases, the β2-microglobulin polypeptide comprises an amino acid sequence having at least 85% amino acid sequence identity to a β2M amino acid sequence depicted in FIG. 6. In some cases, the MHC class I heavy chain polypeptide is an HLA-A, HLA-B, HLA-C, HLA-F, HLA-F, HLA-G, HLA-K, or HLA-L heavy chain. In some cases, the MHC class I heavy chain polypeptide comprises an amino acid sequence having at least 85% amino acid sequence identity to the amino acid sequence depicted in any one of FIG. 3A-3C.

[0553] Suitable Fe polypeptides are described above. In some cases, the Ig Fe polypeptide is an IgG1 Fe polypeptide, an IgG2 Fe polypeptide, an IgG3 Fe polypeptide, an IgG4 Fe polypeptide, an IgA Fe polypeptide, or an IgM Fe polypeptide. In some cases, the Ig Fe polypeptide comprises an amino acid sequence having at least 85% amino acid sequence identity to an amino acid sequence depicted in FIGS. 5A-5G.

[0554] Suitable immunomodulatory polypeptides are described above.

[0555] Suitable proteolytically cleavable linkers are described above. In some cases, the proteolytically cleavable linker comprises an amino acid sequence selected from: a) LEVLFQGP (SEQ ID NO:388); b) ENLYTQS (SEQ ID NO:389); c) DDDDK (SEQ ID NO:390); d) LVPR (SEQ ID NO:391); and e) GSGATNFSLLKQAGDVEENPGP (SEQ ID NO:392).

[0556] In some cases, a linker between the epitope and the first MHC polypeptide comprises a first Cys residue, and the second MHC polypeptide comprises an amino acid substitution to provide a second Cys residue, such that the first and the second Cys residues provide for a disulfide linkage between the linker and the second MHC polypeptide. In some cases, first MHC polypeptide comprises an amino acid substitution to provide a first Cys residue, and the second MHC polypeptide comprises an amino acid substitution to provide a second Cys residue, such that the first Cys residue and the second Cys residue provide for a disulfide linkage between the first MHC polypeptide and the second MHC polypeptide.

### Recombinant Expression Vectors

[0557] The present disclosure provides recombinant expression vectors comprising nucleic acids of the present disclosure. In some cases, the recombinant expression vector is a non-viral vector. In some cases, the recombinant expression vector is a viral construct, e.g., a recombinant adeno-associated virus construct (see, e.g., U.S. Pat. No. 7,078,387), a recombinant adenoviral construct, a recombinant lentiviral construct, a recombinant retroviral construct, a non-integrating viral vector, etc.

[0558] Suitable expression vectors include, but are not limited to, viral vectors (e.g. viral vectors based on vaccinia virus; poliovirus; adenovirus (see, e.g., Li et al., Invest Opthalmol Vis Sci 35:2543 2549, 1994; Borras et al., Gene Ther 6:515 524, 1999; Li and Davidson, PNAS 92:7700 7704, 1995; Sakamoto et al., H Gene Ther 5:1088 1097, 1999; WO 94/12649, WO 93/03769; WO 93/19191; WO 94/28938; WO 95/11984 and WO 95/00655); adeno-associated virus (see, e.g., Ali et al., Hum Gene Ther 9:81 86, 1998, Flannery et al., PNAS 94:6916 6921, 1997; Bennett et al., Invest Opthalmol Vis Sci 38:2857 2863, 1997; Jomary et al., Gene Ther 4:683 690, 1997, Rolling et al., Hum Gene Ther 10:641 648, 1999; Ali et al., Hum Mol Genet 5:591 594, 1996; Srivastava in WO 93/09239, Samulski et al., J. Vir. (1989) 63:3822-3828; Mendelson et al., Virol. (1988) 166:154-165; and Flotte et al., PNAS (1993) 90:10613-10617); SV40; herpes simplex virus; human immunodeficiency virus (see, e.g., Miyoshi et al., PNAS 94:10319 23, 1997; Takahashi et al., J Virol 73:7812 7816, 1999); a retroviral vector (e.g., Murine Leukemia Virus, spleen necrosis virus, and vectors derived from retroviruses such as Rous Sarcoma Virus, Harvey Sarcoma Virus, avian leukosis virus, a lentivirus, human immunodeficiency virus, myeloproliferative sarcoma virus, and mammary tumor virus); and the like.

[0559] Numerous suitable expression vectors are known to those of skill in the art, and many are commercially available. The following vectors are provided by way of example; for eukaryotic host cells: pXT1, pSG5 (Stratagene), pSVK3, pBPV, pMSG, and pSVLSV40 (Pharmacia). However, any other vector may be used so long as it is compatible with the host cell.

[0560] Depending on the host/vector system utilized, any of a number of suitable transcription and translation control elements, including constitutive and inducible promoters, transcription enhancer elements, transcription terminators, etc. may be used in the expression vector (see e.g., Bitter et al. (1987) Methods in Enzymology, 153:516-544).

[0561] In some cases, a nucleotide sequence encoding a DNA-targeting RNA and/or a site-directed modifying polypeptide is operably linked to a control element, e.g., a transcriptional control element, such as a promoter. The transcriptional control element may be functional in either a eukaryotic cell, e.g., a mammalian cell; or a prokaryotic cell (e.g., bacterial or archaeal cell). In some cases, a nucleotide sequence encoding a DNA-targeting RNA and/or a site-directed modifying polypeptide is operably linked to multiple control elements that allow expression of the nucleotide sequence encoding a DNA-targeting RNA and/or a site-directed modifying polypeptide in both prokaryotic and eukaryotic cells.

[0562] Non-limiting examples of suitable eukaryotic promoters (promoters functional in a eukaryotic cell) include those from cytomegalovirus (CMV) immediate early, herpes simplex virus (HSV) thymidine kinase, early and late SV40, long terminal repeats (LTRs) from retrovirus, and mouse metallothionein-1. Selection of the appropriate vector and promoter is well within the level of ordinary skill in the art. The expression vector may also contain a ribosome binding site for translation initiation and a transcription terminator. The expression vector may also include appropriate sequences for amplifying expression.

### Genetically Modified Host Cells

[0563] The present disclosure provides a genetically modified host cell, where the host cell is genetically modified with a nucleic acid of the present disclosure.

[0564] Suitable host cells include eukaryotic cells, such as yeast cells, insect cells, and mammalian cells. In some cases, the host cell is a cell of a mammalian cell line. Suitable mammalian cell lines include human cell lines, non-human primate cell lines, rodent (e.g., mouse, rat) cell lines, and the like. Suitable mammalian cell lines include, but are not limited to, HeLa cells (e.g., American Type Culture Collection (ATCC) No. CCL-2), CHO cells (e.g., ATCC Nos. CRL9618, CCL61, CRL9096), 293 cells (e.g., ATCC No. CRL-1573). Vero cells, NIH 3T3 cells (e.g., ATCC No. CRL-1658). Huh-7 cells, BHK cells (e.g., ATCC No. CCL10), PC12 cells (ATCC No. CRL1721), COS cells, COS-7 cells (ATCC No. CRL1651), RAT1 cells, mouse L cells (ATCC No. CCLI.3), human embryonic kidney (HEK) cells (ATCC No. CRL1573), HLHepG2 cells, and the like.

[0565] In some cases, the host cell is a mammalian cell that has been genetically modified such that it does not synthesize endogenous MHC β2-M.

[0566] In some cases, the host cell is a mammalian cell that has been genetically modified such that it does not synthesize endogenous MHC Class I heavy chain. In some cases, the host cell is a mammalian cell that has been genetically modified such that it does not synthesize endogenous MHC 02-M and such that it does not synthesize endogenous MHC Class I heavy chain.

### Compositions

[0567] The present disclosure provides compositions, including pharmaceutical compositions, comprising a TMMP (synTac) of the present disclosure. The present disclosure provides compositions, including pharmaceutical compositions, comprising a TMMP of the present disclosure. The present disclosure provides compositions, including pharmaceutical compositions, comprising a nucleic acid or a recombinant expression vector of the present disclosure.

### Compositions Comprising a Multimeric Polypeptide

[0568] A composition of the present disclosure can comprise, in addition to a TMMP of the present disclosure, one or more of: a salt, e.g., NaCl, MgCl₂, KCl, MgSO₄, etc.; a buffering agent, e.g., a Tris buffer, N-(2-Hydroxyethyl)piperazine-N′-(2-ethanesulfonic acid) (HEPES), 2-(N-Morpholino)ethanesulfonic acid (MES), 2-(N-Morpholino)ethanesulfonic acid sodium salt (MES), 3-(N-Morpholino)propanesulfonic acid (MOPS), N-tris[Hydroxymethyl]methyl-3-aminopropanesulfonic acid (TAPS), etc.; a solubilizing agent; a detergent, e.g., a non-ionic detergent such as Tween-20, etc.; a protease inhibitor; glycerol; and the like.

[0569] The composition may comprise a pharmaceutically acceptable excipient, a variety of which are known in the art and need not be discussed in detail herein. Pharmaceutically acceptable excipients have been amply described in a variety of publications, including, for example, “Remington: The Science and Practice of Pharmacy”, 19^{th} Ed. (1995), or latest edition, Mack Publishing Co; A. Gennaro (2000) “Remington: The Science and Practice of Pharmacy”, 20th edition, Lippincott, Williams, & Wilkins; Pharmaceutical Dosage Forms and Drug Delivery Systems (1999) H. C. Ansel et al., eds 7^{th} ed., Lippincott, Williams, & Wilkins; and Handbook of Pharmaceutical Excipients (2000) A. H. Kibbe et al., eds., 3^{rd} ed. Amer. Pharmaceutical Assoc.

[0570] A pharmaceutical composition can comprise a TMMP of the present disclosure, and a pharmaceutically acceptable excipient. In some cases, a subject pharmaceutical composition will be suitable for administration to a subject, e.g., will be sterile. For example, in some cases, a subject pharmaceutical composition will be suitable for administration to a human subject, e.g., where the composition is sterile and is free of detectable pyrogens and/or other toxins.

[0571] The protein compositions may comprise other components, such as pharmaceutical grades of mannitol, lactose, starch, magnesium stearate, sodium saccharin, talcum, cellulose, glucose, sucrose, magnesium, carbonate, and the like. The compositions may contain pharmaceutically acceptable auxiliary substances as required to approximate physiological conditions such as pH adjusting and buffering agents, toxicity adjusting agents and the like, for example, sodium acetate, sodium chloride, potassium chloride, calcium chloride, sodium lactate, hydrochloride, sulfate salts, solvates (e.g., mixed ionic salts, water, organics), hydrates (e.g., water), and the like.

[0572] For example, compositions may include aqueous solution, powder form, granules, tablets, pills, suppositories, capsules, suspensions, sprays, and the like. The composition may be formulated according to the various routes of administration described below.

[0573] Where a TMMP of the present disclosure is administered as an injectable (e.g. subcutaneously, intraperitoneally, intramuscularly, and/or intravenously) directly into a tissue, a formulation can be provided as a ready-to-use dosage form, or as non-aqueous form (e.g. a reconstitutable storage-stable powder) or aqueous form, such as liquid composed of pharmaceutically acceptable carriers and excipients. The protein-containing formulations may also be provided so as to enhance serum half-life of the TMMP following administration. For example, the TMMP may be provided in a liposome formulation, prepared as a colloid, or other conventional techniques for extending serum half-life. A variety of methods are available for preparing liposomes, as described in, e.g., Szoka et al. 1980 Ann. Rev. Biophys. Bioeng. 9:467, U.S. Pat. Nos. 4,235,871, 4,501,728 and 4,837,028. The preparations may also be provided in controlled release or slow-release forms.

[0574] Other examples of formulations suitable for parenteral administration include isotonic sterile injection solutions, anti-oxidants, bacteriostats, and solutes that render the formulation isotonic with the blood of the intended recipient, suspending agents, solubilizers, thickening agents, stabilizers, and preservatives. For example, a subject pharmaceutical composition can be present in a container, e.g., a sterile container, such as a syringe. The formulations can be presented in unit-dose or multi-dose sealed containers, such as ampules and vials, and can be stored in a freeze-dried (lyophilized) condition requiring only the addition of the sterile liquid excipient, for example, water, for injections, immediately prior to use. Extemporaneous injection solutions and suspensions can be prepared from sterile powders, granules, and tablets.

[0575] The concentration of a TMMP of the present disclosure in a formulation can vary widely (e.g., from less than about 0.1%, usually at or at least about 2% to as much as 20% to 50% or more by weight) and will usually be selected primarily based on fluid volumes, viscosities, and patient-based factors in accordance with the particular mode of administration selected and the patient's needs.

[0576] The present disclosure provides a container comprising a composition of the present disclosure, e.g., a liquid composition. The container can be, e.g., a syringe, an ampoule, and the like. In some cases, the container is sterile. In some cases, both the container and the composition are sterile.

[0577] The present disclosure provides compositions, including pharmaceutical compositions, comprising a TMMP of the present disclosure. A composition can comprise: a) a TMMP of the present disclosure; and b) an excipient, as described above. In some cases, the excipient is a pharmaceutically acceptable excipient.

[0578] In some cases, a TMMP of the present disclosure is present in a liquid composition. Thus, the present disclosure provides compositions (e.g., liquid compositions, including pharmaceutical compositions) comprising a TMMP of the present disclosure. In some cases, a composition of the present disclosure comprises: a) a TMMP of the present disclosure; and b) saline (e.g., 0.9% NaCl). In some cases, the composition is sterile. In some cases, the composition is suitable for administration to a human subject, e.g., where the composition is sterile and is free of detectable pyrogens and/or other toxins. Thus, the present disclosure provides a composition comprising: a) a TMMP of the present disclosure; and b) saline (e.g., 0.9% NaCl), where the composition is sterile and is free of detectable pyrogens and/or other toxins.

### Compositions Comprising a Nucleic Acid or a Recombinant Expression Vector

[0579] The present disclosure provides compositions, e.g., pharmaceutical compositions, comprising a nucleic acid or a recombinant expression vector of the present disclosure. A wide variety of pharmaceutically acceptable excipients is known in the art and need not be discussed in detail herein. Pharmaceutically acceptable excipients have been amply described in a variety of publications, including, for example, A. Gennaro (2000) “Remington: The Science and Practice of Pharmacy”, 20th edition, Lippincott, Williams, & Wilkins; Pharmaceutical Dosage Forms and Drug Delivery Systems (1999) H. C. Ansel et al., eds 7^{th} ed., Lippincott, Williams, & Wilkins; and Handbook of Pharmaceutical Excipients (2000) A. H. Kibbe et al., eds., 3^{rd} ed. Amer. Pharmaceutical Assoc.

[0580] A composition of the present disclosure can include: a) one or more nucleic acids or one or more recombinant expression vectors comprising nucleotide sequences encoding a TMMP; and b) one or more of: a buffer, a surfactant, an antioxidant, a hydrophilic polymer, a dextrin, a chelating agent, a suspending agent, a solubilizer, a thickening agent, a stabilizer, a bacteriostatic agent, a wetting agent, and a preservative. Suitable buffers include, but are not limited to, (such as N,N-bis(2-hydroxyethyl)-2-aminoethanesulfonic acid (BES), bis(2-hydroxyethyl)amino-tris(hydroxymethyl)methane (BIS-Tris), N-(2-hydroxyethyl)piperazine-N′3-propanesulfonic acid (EPPS or HEPPS), glycylglycine, N-2-hydroxyethylpiperazine-N′-2-ethanesulfonic acid (HEPES), 3-(N-morpholino)propane sulfonic acid (MOPS), piperazine-N,N′-bis(2-ethane-sulfonic acid) (PIPES), sodium bicarbonate, 3-(N-tris(hydroxymethyl)-methyl-amino)-2-hydroxy-propanesulfonic acid) TAPSO, (N-tris(hydroxymethyl)methyl-2-aminoethanesulfonic acid (TES), N-tris(hydroxymethyl)methyl-glycine (Tricine), tris(hydroxymethyl)-aminomethane (Tris), etc.). Suitable salts include, e.g., NaCl, MgCl₂, KCl, MgSO₄, etc.

[0581] A pharmaceutical formulation of the present disclosure can include a nucleic acid or recombinant expression vector of the present disclosure in an amount of from about 0.001% to about 90% (w/w). In the description of formulations, below, “subject nucleic acid or recombinant expression vector” will be understood to include a nucleic acid or recombinant expression vector of the present disclosure. For example, in some cases, a subject formulation comprises a nucleic acid or recombinant expression vector of the present disclosure.

[0582] A subject nucleic acid or recombinant expression vector can be admixed, encapsulated, conjugated or otherwise associated with other compounds or mixtures of compounds; such compounds can include, e.g., liposomes or receptor-targeted molecules. A subject nucleic acid or recombinant expression vector can be combined in a formulation with one or more components that assist in uptake, distribution and/or absorption.

[0583] A subject nucleic acid or recombinant expression vector composition can be formulated into any of many possible dosage forms such as, but not limited to, tablets, capsules, gel capsules, liquid syrups, soft gels, suppositories, and enemas. A subject nucleic acid or recombinant expression vector composition can also be formulated as suspensions in aqueous, non-aqueous or mixed media. Aqueous suspensions may further contain substances which increase the viscosity of the suspension including, for example, sodium carboxymethylcellulose, sorbitol and/or dextran. The suspension may also contain stabilizers.

[0584] A formulation comprising a subject nucleic acid or recombinant expression vector can be a liposomal formulation. As used herein, the term “liposome” means a vesicle composed of amphiphilic lipids arranged in a spherical bilayer or bilayers. Liposomes are unilamellar or multilamellar vesicles which have a membrane formed from a lipophilic material and an aqueous interior that contains the composition to be delivered. Cationic liposomes are positively charged liposomes that can interact with negatively charged DNA molecules to form a stable complex. Liposomes that are pH sensitive or negatively charged are believed to entrap DNA rather than complex with it. Both cationic and noncationic liposomes can be used to deliver a subject nucleic acid or recombinant expression vector.

[0585] Liposomes also include “sterically stabilized” liposomes, a term which, as used herein, refers to liposomes comprising one or more specialized lipids that, when incorporated into liposomes, result in enhanced circulation lifetimes relative to liposomes lacking such specialized lipids. Examples of sterically stabilized liposomes are those in which part of the vesicle-forming lipid portion of the liposome comprises one or more glycolipids or is derivatized with one or more hydrophilic polymers, such as a polyethylene glycol (PEG) moiety. Liposomes and their uses are further described in U.S. Pat. No. 6,287,860, which is incorporated herein by reference in its entirety.

[0586] The formulations and compositions of the present disclosure may also include surfactants. The use of surfactants in drug products, formulations and in emulsions is well known in the art. Surfactants and their uses are further described in U.S. Pat. No. 6,287,860.

[0587] In one embodiment, various penetration enhancers are included, to effect the efficient delivery of nucleic acids. In addition to aiding the diffusion of non-lipophilic drugs across cell membranes, penetration enhancers also enhance the permeability of lipophilic drugs. Penetration enhancers may be classified as belonging to one of five broad categories. i.e., surfactants, fatty acids, bile salts, chelating agents, and non-chelating non-surfactants. Penetration enhancers and their uses are further described in U.S. Pat. No. 6,287,860, which is incorporated herein by reference in its entirety.

[0588] Compositions and formulations for oral administration include powders or granules, microparticulates, nanoparticulates, suspensions or solutions in water or non-aqueous media, capsules, gel capsules, sachets, tablets, or minitablets. Thickeners, flavoring agents, diluents, emulsifiers, dispersing aids or binders may be desirable. Suitable oral formulations include those in which a subject antisense nucleic acid is administered in conjunction with one or more penetration enhancers surfactants and chelators. Suitable surfactants include, but are not limited to, fatty acids and/or esters or salts thereof, bile acids and/or salts thereof. Suitable bile acids/salts and fatty acids and their uses are further described in U.S. Pat. No. 6,287,860. Also suitable are combinations of penetration enhancers, for example, fatty acids/salts in combination with bile acids/salts. An exemplary suitable combination is the sodium salt of lauric acid, capric acid, and UDCA. Further penetration enhancers include, but are not limited to, polyoxyethylene-9-lauryl ether, and polyoxyethylene-20-cetyl ether. Suitable penetration enhancers also include propylene glycol, dimethylsulfoxide, triethanoamine, N,N-dimethylacetamide, N,N-dimethylformamide, 2-pyrrolidone and derivatives thereof, tetrahydrofurfuryl alcohol, and AZONE™.

### Methods of Modulating T Cell Activity

[0589] The present disclosure provides a method of selectively modulating the activity of an epitope-specific T cell, the method comprising contacting the T cell with a TMMP of the present disclosure, where contacting the T cell with a TMMP of the present disclosure selectively modulates the activity of the epitope-specific T cell. In some cases, the contacting occurs in vitro. In some cases, the contacting occurs in vivo. In some cases, the contacting occurs ex vivo.

[0590] In some cases, e.g., where the target T cell is a CD8⁺ T cell, the TMMP comprises Class I MHC polypeptides (e.g., β2-microglobulin and Class I MHC heavy chain).

[0591] Where a TMMP of the present disclosure includes an immunomodulatory polypeptide that is an activating polypeptide, contacting the T cell with the TMMP activates the epitope-specific T cell. In some instances, the epitope-specific T cell is a T cell that is specific for an epitope present on a cancer cell, and contacting the epitope-specific T cell with the TMMP increases cytotoxic activity of the T cell toward the cancer cell. In some instances, the epitope-specific T cell is a T cell that is specific for an epitope present on a cancer cell, and contacting the epitope-specific T cell with the TMMP increases the number of the epitope-specific T cells.

[0592] In some instances, the epitope-specific T cell is a T cell that is specific for an epitope present on a virus-infected cell, and contacting the epitope-specific T cell with the TMMP increases cytotoxic activity of the T cell toward the virus-infected cell. In some instances, the epitope-specific T cell is a T cell that is specific for an epitope present on a virus-infected cell, and contacting the epitope-specific T cell with the TMMP increases the number of the epitope-specific T cells.

[0593] Where a TMMP of the present disclosure includes an immunomodulatory polypeptide that is an inhibiting polypeptide, contacting the T cell with the TMMP inhibits the epitope-specific T cell. In some instances, the epitope-specific T cell is a self-reactive T cell that is specific for an epitope present in a self antigen, and the contacting reduces the number of the self-reactive T cells.

[0594] The present disclosure provides a method of modulating an immune response in an individual, the method comprising administering to the individual an effective amount of a TMMP of the present disclosure. Administering the TMMP induces an epitope-specific T cell response (e.g., a WT-1 epitope-specific T-cell response) and an epitope-non-specific T cell response, where the ratio of the epitope-specific T cell response to the epitope-non-specific T cell response is at least 2:1. In some cases, the ratio of the epitope-specific T cell response to the epitope-non-specific T cell response is at least 5:1. In some cases, the ratio of the epitope-specific T cell response to the epitope-non-specific T cell response is at least 10:1. In some cases, the ratio of the epitope-specific T cell response to the epitope-non-specific T cell response is at least 25:1. In some cases, the ratio of the epitope-specific T cell response to the epitope-non-specific T cell response is at least 50:1. In some cases, the ratio of the epitope-specific T cell response to the epitope-non-specific T cell response is at least 100:1. In some cases, the individual is a human. In some cases, the modulating increases a cytotoxic T-cell response to a cancer cell, e.g., a WT-1-expressing cancer cell. In some cases, the administering is intravenous, subcutaneous, intramuscular, systemic, intralymphatic, distal to a treatment site, local, or at or near a treatment site.

[0595] The present disclosure provides a method of delivering a costimulatory (i.e., immunomodulatory) polypeptide selectively to target T cell, the method comprising contacting a mixed population of T cells with a TMMP of the present disclosure, where the mixed population of T cells comprises the target T cell and non-target T cells, where the target T cell is specific for the epitope present within the TMMP (e.g., where the target T cell is specific for the WT-1 epitope present within the TMMP), and where the contacting step delivers the one or more costimulatory polypeptides (immunomodulatory polypeptides) present within the TMMP to the target T cell. In some cases, the population of T cells is in vitro. In some cases, the population of T cells is in vivo in an individual. In some cases, the method comprises administering the TMMP to the individual. In some case, the T cell is a cytotoxic T cell. In some cases, the mixed population of T cells is an in vitro population of mixed T cells obtained from an individual, and the contacting step results in activation and/or proliferation of the target T cell, generating a population of activated and/or proliferated target T cells; in some of these instances, the method further comprises administering the population of activated and/or proliferated target T cells to the individual.

[0596] The present disclosure provides a method of detecting, in a mixed population of T cells obtained from an individual, the presence of a target T cell that binds an epitope of interest (e.g., a WT-1 epitope), the method comprising: a) contacting in vitro the mixed population of T cells with a TMMP of the present disclosure, wherein the TMMP comprises the epitope of interest (e.g., the WT-1 epitope); and b) detecting activation and/or proliferation of T cells in response to said contacting, wherein activated and/or proliferated T cells indicates the presence of the target T cell.

### Treatment Methods

[0597] The present disclosure provides a method of treatment of an individual, the method comprising administering to the individual an amount of a TMMP of the present disclosure, or one or more nucleic acids encoding the TMMP, effective to treat the individual. Also provided is a TMMP of the present disclosure for use in a method of treatment of the human or animal body. In some cases, a treatment method of the present disclosure comprises administering to an individual in need thereof one or more recombinant expression vectors comprising nucleotide sequences encoding a TMMP of the present disclosure. In some cases, a treatment method of the present disclosure comprises administering to an individual in need thereof one or more mRNA molecules comprising nucleotide sequences encoding a TMMP of the present disclosure. In some cases, a treatment method of the present disclosure comprises administering to an individual in need thereof a TMMP of the present disclosure. Conditions that can be treated include, e.g., cancer and autoimmune disorders, as described below.

[0598] In some cases, a TMMP of the present disclosure, when administered to an individual in need thereof, induces both an epitope-specific T cell response and an epitope non-specific T cell response. In other words, in some cases, a TMMP of the present disclosure, when administered to an individual in need thereof, induces an epitope-specific T cell response by modulating the activity of a first T cell that displays both: i) a TCR specific for the epitope present in the TMMP; ii) a co-immunomodulatory polypeptide that binds to the immunomodulatory polypeptide present in the TMMP; and induces an epitope non-specific T cell response by modulating the activity of a second T cell that displays: i) a TCR specific for an epitope other than the epitope present in the TMMP; and ii) a co-immunomodulatory polypeptide that binds to the immunomodulatory polypeptide present in the TMMP. The ratio of the epitope-specific T cell response to the epitope-non-specific T cell response is at least 2:1, at least 5:1, at least 10:1, at least 15:1, at least 20:1, at least 25:1, at least 50:1, or at least 100:1. The ratio of the epitope-specific T cell response to the epitope-non-specific T cell response is from about 2:1 to about 5:1, from about 5:1 to about 10:1, from about 10:1 to about 15:1, from about 15:1 to about 20:1, from about 20:1 to about 25:1, from about 25:1 to about 50:1, or from about 50:1 to about 100:1, or more than 100:1. “Modulating the activity” of a T cell can include one or more of: i) activating a cytotoxic (e.g., CD8⁺) T cell; ii) inducing cytotoxic activity of a cytotoxic (e.g., CD8⁺) T cell; iii) inducing production and release of a cytotoxin (e.g., a perforin; a granzyme; a granulysin) by a cytotoxic (e.g., CD8⁺) T cell; iv) inhibiting activity of an autoreactive T cell; and the like.

[0599] The combination of the reduced affinity of the immunomodulatory polypeptide for its cognate co-immunomodulatory polypeptide, and the affinity of the epitope for a TCR, provides for enhanced selectivity of a TMMP of the present disclosure. Thus, for example, a TMMP of the present disclosure binds with higher avidity to a first T cell that displays both: i) a TCR specific for the epitope present in the TMMP; and ii) a co-immunomodulatory polypeptide that binds to the immunomodulatory polypeptide present in the TMMP, compared to the avidity to which it binds to a second T cell that displays: i) a TCR specific for an epitope other than the epitope present in the TMMP; and ii) a co-immunomodulatory polypeptide that binds to the immunomodulatory polypeptide present in the TMMP.

[0600] The present disclosure provides a method of selectively modulating the activity of an epitope-specific T cell in an individual, the method comprising administering to the individual an effective amount of a TMMP of the present disclosure, or one or more nucleic acids (e.g., expression vectors; mRNA; etc.) comprising nucleotide sequences encoding the TMMP, where the TMMP selectively modulates the activity of the epitope-specific T cell in the individual. Selectively modulating the activity of an epitope-specific T cell can treat a disease or disorder in the individual. Thus, the present disclosure provides a treatment method comprising administering to an individual in need thereof an effective amount of a TMMP of the present disclosure.

[0601] In some cases, the immunomodulatory polypeptide (“MOD”) is an activating polypeptide, and the TMMP activates the epitope-specific T cell. In some cases, the epitope is a cancer-associated epitope, and the TMMP increases the activity of a T cell specific for the cancer-associate epitope. In some cases, the MOD is an activating polypeptide, and the TMMP activates a WT-1 epitope-specific T-cell. In some cases, the T cells are T-helper cells (CD4⁺ cells), cytotoxic T-cells (CD8⁺ cells), or NK-T-cells. In some cases, the epitope is a WT-1 epitope, and the TMMP increases the activity of a T-cell specific for a cancer cell expressing the WT-1 epitope (e.g., T-helper cells (CD4⁺ cells), cytotoxic T-cells (CD8⁺ cells), and/or NK-T-cells). Activation of CD4⁺ T cells can include increasing proliferation of CD4⁺ T cells and/or inducing or enhancing release cytokines by CD4+ T cells. Activation of NK-T-cells and/or CD8+ cells can include: increasing proliferation of NK-T-cells and/or CD8+ cells; and/or inducing release of cytokines such as interferon γ by NK-T-cells and/or CD8+ cells. In some cases, a TMMP of the present disclosure reduces proliferation and/or activity of a regulatory T (Treg) cell. Tregs are FoxP3⁺, CD4⁺ T cells. In some cases, e.g., where a TMMP of the present disclosure comprises an inhibitory immunomodulatory polypeptide (e.g., PD-L1, FasL, and the like), the TMMP reduces the proliferation and/or activity of a Treg.

[0602] In some cases, the immunomodulatory polypeptide is an activating polypeptide, and the TMMP activates the epitope-specific T cell. In some cases, the epitope is a cancer-associated epitope, and the TMMP increases the activity of a T cell specific for the cancer-associate epitope.

[0603] Where a TMMP of the present disclosure comprises a WT-1 peptide epitope, the TMMP can be administered to an individual having a WT-1-expressing cancer. WT1-expressing cancers include a leukemia, a desmoplastic small round cell tumor, a gastric cancer, a colon cancer, a lung cancer, a breast cancer, a germ cell tumor, an ovarian cancer, a uterine cancer, a thyroid cancer, a liver cancer, a renal cancer, a Kaposi's sarcoma, a sarcoma, a hepatocellular carcinoma, a Wilms' tumor, an acute myelogenous leukemia (AML), a myelodysplastic syndrome (MDS), an a non-small cell lung cancer (NSCLC), a myeloma, pancreatic cancer, colorectal cancer, a mesothelioma, a soft tissue sarcoma, a neuroblastoma, and a nephroblastoma.

[0604] Where a TMMP of the present disclosure comprises a WT-1 peptide epitope, the TMMP can be administered to an individual in need thereof to treat acute myeloid leukemia (AML) in the individual. Where a TMMP of the present disclosure comprises a WT-1 peptide epitope, the TMMP can be administered to an individual in need thereof to treat a myeloma in the individual. Where a TMMP of the present disclosure comprises a WT-1 peptide epitope, the TMMP can be administered to an individual in need thereof to treat ovarian cancer in the individual. Where a TMMP of the present disclosure comprises a WT-1 peptide epitope, the TMMP can be administered to an individual in need thereof to treat pancreatic cancer in the individual. Where a TMMP of the present disclosure comprises a WT-1 peptide epitope, the TMMP can be administered to an individual in need thereof to treat non-small cell lung cancer (NSCLC) in the individual. Where a TMMP of the present disclosure comprises a WT-1 peptide epitope, the TMMP can be administered to an individual in need thereof to treat colorectal cancer (CRC) in the individual. Where a TMMP of the present disclosure comprises a WT-1 peptide epitope, the TMMP can be administered to an individual in need thereof to treat breast cancer in the individual. Where a TMMP of the present disclosure comprises a WT-1 peptide epitope, the TMMP can be administered to an individual in need thereof to treat a Wilms tumor in the individual. Where a TMMP of the present disclosure comprises a WT-1 peptide epitope, the TMMP can be administered to an individual in need thereof to treat mesothelioma in the individual. Where a TMMP of the present disclosure comprises a WT-1 peptide epitopic, the TMMP can be administered to an individual in need thereof to treat soft tissue sarcoma in the individual. Where a TMMP of the present disclosure comprises a WT-1 peptide epitope, the TMMP can be administered to an individual in need thereof to treat a neuroblastoma in the individual. Where a TMMP of the present disclosure comprises a WT-1 peptide epitope, the TMMP can be administered to an individual in need thereof to treat a nephroblastoma in the individual.

[0605] The present disclosure provides a method of treating cancer in an individual, the method comprising administering to the individual an effective amount of a TMMP of the present disclosure, or one or more nucleic acids (e.g., expression vectors; mRNA; etc.) comprising nucleotide sequences encoding the TMMP, where the TMMP comprises a T-cell epitope that is a cancer epitope, and where the TMMP comprises a stimulatory immunomodulatory polypeptide. In some cases, an “effective amount” of a TMMP of the present disclosure is an amount that, when administered in one or more doses to an individual in need thereof, reduces the number of cancer cells in the individual. For example, in some cases, an “effective amount” of a TMMP of the present disclosure is an amount that, when administered in one or more doses to an individual in need thereof, reduces the number of cancer cells in the individual by at least 10%, at least 15%, at least 20%, at least 25%, at least 30%, at least 40%, at least 50%, at least 60%, at least 70%, at least 80%, at least 90%, or at least 95%, compared to the number of cancer cells in the individual before administration of the TMMP, or in the absence of administration with the TMMP. In some cases, an “effective amount” of a TMMP of the present disclosure is an amount that, when administered in one or more doses to an individual in need thereof, reduces the number of cancer cells in the individual to undetectable levels.

[0606] In some cases, an “effective amount” of a TMMP of the present disclosure is an amount that, when administered in one or more doses to an individual in need thereof, reduces the tumor mass in the individual. For example, in some cases, an “effective amount” of a TMMP of the present disclosure is an amount that, when administered in one or more doses to an individual in need thereof (an individual having a tumor), reduces the tumor mass in the individual by at least 10%, at least 15%, at least 20%, at least 25%, at least 30%, at least 40%, at least 50%, at least 60%, at least 70%, at least 80%, at least 90%, or at least 95%, compared to the tumor mass in the individual before administration of the TMMP, or in the absence of administration with the TMMP, in some cases, an “effective amount” of a TMMP of the present disclosure is an amount that, when administered in one or more doses to an individual in need thereof (an individual having a tumor), reduces the tumor volume in the individual. For example, in some cases, an “effective amount” of a TMMP of the present disclosure is an amount that, when administered in one or more doses to an individual in need thereof (an individual having a tumor), reduces the tumor volume in the individual by at least 10%, at least 15%, at least 20%, at least 25%, at least 30%, at least 40%, at least 50%, at least 60%, at least 70%, at least 80%, at least 90%, or at least 95%, compared to the tumor volume in the individual before administration of the TMMP, or in the absence of administration with the TMMP. In some cases, an “effective amount” of a TMMP of the present disclosure is an amount that, when administered in one or more doses to an individual in need thereof, increases survival time of the individual. For example, in some cases, an “effective amount” of a TMMP of the present disclosure is an amount that, when administered in one or more doses to an individual in need thereof, increases survival time of the individual by at least 1 month, at least 2 months, at least 3 months, from 3 months to 6 months, from 6 months to 1 year, from 1 year to 2 years, from 2 years to 5 years, from 5 years to 10 years, or more than 10 years, compared to the expected survival time of the individual in the absence of administration with the TMMP.

[0607] In some instances, the epitope-specific T cell is a T cell that is specific for an epitope present on a virus-infected cell, and contacting the epitope-specific T cell with the TMMP increases cytotoxic activity of the T cell toward the virus-infected cell. In some instances, the epitope-specific T cell is a T cell that is specific for an epitope present on a virus-infected cell, and contacting the epitope-specific T cell with the TMMP increases the number of the epitope-specific T cells.

[0608] Thus, the present disclosure provides a method of treating a virus infection in an individual, the method comprising administering to the individual an effective amount of a TMMP of the present disclosure, or one or more nucleic acids comprising nucleotide sequences encoding the TMMP, where the TMMP comprises a T-cell epitope that is a viral epitope, and where the TMMP comprises a stimulatory immunomodulatory polypeptide. In some cases, an “effective amount” of a TMMP is an amount that, when administered in one or more doses to an individual in need thereof, reduces the number of virus-infected cells in the individual. For example, in some cases, an “effective amount” of a TMMP of the present disclosure is an amount that, when administered in one or more doses to an individual in need thereof, reduces the number of virus-infected cells in the individual by at least 10%, at least 15%, at least 20%, at least 25%, at least 30%, at least 40%, at least 50%, at least 60%, at least 70%, at least 80%, at least 90%, or at least 95%, compared to the number of virus-infected cells in the individual before administration of the TMMP, or in the absence of administration with the TMMP. In some cases, an “effective amount” of a TMMP of the present disclosure is an amount that, when administered in one or more doses to an individual in need thereof, reduces the number of virus-infected cells in the individual to undetectable levels.

[0609] Thus, the present disclosure provides a method of treating an infection in an individual, the method comprising administering to the individual an effective amount of a TMMP of the present disclosure, or one or more nucleic acids comprising nucleotide sequences encoding the TMMP, where the TMMP comprises a T-cell epitope that is a pathogen-associated epitope, and where the TMMP comprises a stimulatory immunomodulatory polypeptide. In some cases, an “effective amount” of a TMMP of the present disclosure is an amount that, when administered in one or more doses to an individual in need thereof, reduces the number of pathogens in the individual. For example, in some cases, an “effective amount” of a TMMP of the present disclosure is an amount that, when administered in one or more doses to an individual in need thereof, reduces the number of pathogens in the individual by at least 10%, at least 15%, at least 20%, at least 25%, at least 30%, at least 40%, at least 50%, at least 60%, at least 70%, at least 80%, at least 90%, or at least 95%, compared to the number of pathogens in the individual before administration of the TMMP, or in the absence of administration with the TMMP. In some cases, an “effective amount” of a TMMP of the present disclosure is an amount that, when administered in one or more doses to an individual in need thereof, reduces the number of pathogens in the individual to undetectable levels. Pathogens include viruses, bacteria, protozoans, and the like.

[0610] In some cases, the immunomodulatory polypeptide is an inhibitory polypeptide, and the TMMP inhibits activity of the epitope-specific T cell. In some cases, the epitope is a self-epitope, and the TMMP selectively inhibits the activity of a T cell specific for the self-epitope.

[0611] The present disclosure provides a method of treating an autoimmune disorder in an individual, the method comprising administering to the individual an effective amount of a TMMP of the present disclosure, or one or more nucleic acids comprising nucleotide sequences encoding the TMMP, where the TMMP comprises a T-cell epitope that is a self epitope, and where the TMMP comprises an inhibitory immunomodulatory polypeptide. In some cases, an “effective amount” of a TMMP of the present disclosure is an amount that, when administered in one or more doses to an individual in need thereof, reduces the number self-reactive T cells by at least 10%, at least 15%, at least 20%, at least 25%, at least 30%, at least 40%, at least 50%, at least 60%, at least 70%, at least 80%, at least 90%, or at least 95%, compared to number of self-reactive T cells in the individual before administration of the TMMP, or in the absence of administration with the TMMP. In some cases, an “effective amount” of a TMMP is an amount that, when administered in one or more doses to an individual in need thereof, reduces production of Th2 cytokines in the individual. In some cases, an “effective amount” of a TMMP of the present disclosure is an amount that, when administered in one or more doses to an individual in need thereof, ameliorates one or more symptoms associated with an autoimmune disease in the individual.

[0612] As noted above, in some cases, in carrying out a subject treatment method, a TMMP of the present disclosure is administered to an individual in need thereof, as the TMMP per se. In other instances, in carrying out a subject treatment method, one or more nucleic acids comprising nucleotide sequences encoding a TMMP of the present disclosure is/are administering to an individual in need thereof. Thus, in other instances, one or more nucleic acids of the present disclosure, e.g., one or more recombinant expression vectors of the present disclosure, is/are administered to an individual in need thereof.

### Formulations

[0613] Suitable formulations are described above, where suitable formulations include a pharmaceutically acceptable excipient. In some cases, a suitable formulation comprises: a) a TMMP of the present disclosure; and b) a pharmaceutically acceptable excipient. In some cases, a suitable formulation comprises: a) a nucleic acid comprising a nucleotide sequence encoding a TMMP of the present disclosure; and b) a pharmaceutically acceptable excipient; in some instances, the nucleic acid is an mRNA. In some cases, a suitable formulation comprises: a) a first nucleic acid comprising a nucleotide sequence encoding the first polypeptide of a TMMP of the present disclosure; b) a second nucleic acid comprising a nucleotide sequence encoding the second polypeptide of a TMMP of the present disclosure; and c) a pharmaceutically acceptable excipient. In some cases, a suitable formulation comprises: a) a recombinant expression vector comprising a nucleotide sequence encoding a TMMP of the present disclosure; and b) a pharmaceutically acceptable excipient. In some cases, a suitable formulation comprises: a) a first recombinant expression vector comprising a nucleotide sequence encoding the first polypeptide of a TMMP of the present disclosure; b) a second recombinant expression vector comprising a nucleotide sequence encoding the second polypeptide of a TMMP of the present disclosure; and c) a pharmaceutically acceptable excipient.

[0614] Suitable pharmaceutically acceptable excipients are described above.

### Dosages

[0615] A suitable dosage can be determined by an attending physician or other qualified medical personnel, based on various clinical factors. As is well known in the medical arts, dosages for any one patient depend upon many factors, including the patient's size, body surface area, age, the particular polypeptide or nucleic acid to be administered, sex of the patient, time, and route of administration, general health, and other drugs being administered concurrently. A TMMP of the present disclosure may be administered in amounts between 1 ng/kg body weight and 20 mg/kg body weight per dose, e.g. between 0.1 mg/kg body weight to 10 mg/kg body weight, e.g. between 0.5 mg/kg body weight to 5 mg/kg body weight; however, doses below or above this exemplary range are envisioned, especially considering the aforementioned factors. If the regimen is a continuous infusion, it can also be in the range of 1 μg to 10 mg per kilogram of body weight per minute. A TMMP of the present disclosure can be administered in an amount of from about 1 mg/kg body weight to 50 mg/kg body weight, e.g., from about 1 mg/kg body weight to about 5 mg/kg body weight, from about 5 mg/kg body weight to about 10 mg/kg body weight, from about 10 mg/kg body weight to about 15 mg/kg body weight, from about 15 mg/kg body weight to about 20 mg/kg body weight, from about 20 mg/kg body weight to about 25 mg/kg body weight, from about 25 mg/kg body weight to about 30 mg/kg body weight, from about 30 mg/kg body weight to about 35 mg/kg body weight, from about 35 mg/kg body weight to about 40 mg/kg body weight, or from about 40 mg/kg body weight to about 50 mg/kg body weight.

[0616] In some cases, a suitable dose of a TMMP of the present disclosure is from 0.01 μg to 100 g per kg of body weight, from 0.1 μg to 10 g per kg of body weight, from 1 μg to 1 g per kg of body weight, from 10 μg to 100 mg per kg of body weight, from 100 μg to 10 mg per kg of body weight, or from 100 μg to 1 mg per kg of body weight. Persons of ordinary skill in the art can easily estimate repetition rates for dosing based on measured residence times and concentrations of the administered agent in bodily fluids or tissues. Following successful treatment, it may be desirable to have the patient undergo maintenance therapy to prevent the recurrence of the disease state, wherein a TMMP of the present disclosure is administered in maintenance doses, ranging from 0.01 μg to 100 g per kg of body weight, from 0.1 μg to 10 g per kg of body weight, from 1 μg to 1 g per kg of body weight, from 10 μg to 100 mg per kg of body weight, from 100 μg to 10 mg per kg of body weight, or from 100 μg to 1 mg per kg of body weight.

[0617] Those of skill will readily appreciate that dose levels can vary as a function of the specific TMMP, the severity of the symptoms and the susceptibility of the subject to side effects. Preferred dosages for a given compound are readily determinable by those of skill in the art by a variety of means.

[0618] In some cases, multiple doses of a TMMP of the present disclosure, a nucleic acid of the present disclosure, or a recombinant expression vector of the present disclosure are administered. The frequency of administration of a TMMP of the present disclosure, a nucleic acid of the present disclosure, or a recombinant expression vector of the present disclosure can vary depending on any of a variety of factors, e.g., severity of the symptoms, etc. For example, in some cases, a TMMP of the present disclosure, a nucleic acid of the present disclosure, or a recombinant expression vector of the present disclosure is administered once per month, twice per month, three times per month, every other week (qow), once per week (qw), twice per week (biw), three times per week (tiw), four times per week, five times per week, six times per week, every other day (qod), daily (qd), twice a day (qid), or three times a day (tid).

[0619] The duration of administration of a TMMP of the present disclosure, a nucleic acid of the present disclosure, or a recombinant expression vector of the present disclosure, e.g., the period of time over which a TMMP of the present disclosure, a nucleic acid of the present disclosure, or a recombinant expression vector of the present disclosure is administered, can vary, depending on any of a variety of factors, e.g., patient response, etc. For example, a TMMP of the present disclosure, a nucleic acid of the present disclosure, or a recombinant expression vector of the present disclosure can be administered over a period of time ranging from about one day to about one week, from about two weeks to about four weeks, from about one month to about two months, from about two months to about four months, from about four months to about six months, from about six months to about eight months, from about eight months to about 1 year, from about 1 year to about 2 years, or from about 2 years to about 4 years, or more.

### Routes of Administration

[0620] An active agent (a TMMP of the present disclosure, a nucleic acid of the present disclosure, or a recombinant expression vector of the present disclosure) is administered to an individual using any available method and route suitable for drug delivery, including in vivo and ex vivo methods, as well as systemic and localized routes of administration.

[0621] Conventional and pharmaceutically acceptable routes of administration include intratumoral, peritumoral, intramuscular, intralymphatic, intratracheal, intracranial, subcutaneous, intradermal, topical application, intravenous, intraarterial, rectal, nasal, oral, and other enteral and parenteral routes of administration. Routes of administration may be combined, if desired, or adjusted depending upon the TMMP and/or the desired effect. A TMMP of the present disclosure, or a nucleic acid or recombinant expression vector of the present disclosure, can be administered in a single dose or in multiple doses.

[0622] In some cases, a TMMP of the present disclosure, a nucleic acid of the present disclosure, or a recombinant expression vector of the present disclosure is administered intravenously. In some cases, a TMMP of the present disclosure, a nucleic acid of the present disclosure, or a recombinant expression vector of the present disclosure is administered intramuscularly. In some cases, a TMMP of the present disclosure, a nucleic acid of the present disclosure, or a recombinant expression vector of the present disclosure is administered intralymphatically. In some cases, a TMMP of the present disclosure, a nucleic acid of the present disclosure, or a recombinant expression vector of the present disclosure is administered locally. In some cases, a TMMP of the present disclosure, a nucleic acid of the present disclosure, or a recombinant expression vector of the present disclosure is administered intratumorally. In some cases, a TMMP of the present disclosure, a nucleic acid of the present disclosure, or a recombinant expression vector of the present disclosure is administered peritumorally. In some cases, a TMMP of the present disclosure, a nucleic acid of the present disclosure, or a recombinant expression vector of the present disclosure is administered intracranially. In some cases, a TMMP of the present disclosure, a nucleic acid of the present disclosure, or a recombinant expression vector of the present disclosure is administered subcutaneously.

[0623] In some cases, a TMMP of the present disclosure is administered intravenously. In some cases, a TMMP of the present disclosure is administered intramuscularly. In some cases, a TMMP of the present disclosure is administered locally. In some cases, a TMMP the present disclosure is administered intratumorally. In some cases, a TMMP of the present disclosure is administered peritumorally. In some cases, a TMMP of the present disclosure is administered intracranially. In some cases, a TMMP is administered subcutaneously. In some cases, a TMMP of the present disclosure is administered intralymphatically.

[0624] A TMMP of the present disclosure, a nucleic acid of the present disclosure, or a recombinant expression vector of the present disclosure can be administered to a host using any available conventional methods and routes suitable for delivery of conventional drugs, including systemic or localized routes. In general, routes of administration contemplated for use in a method of the present disclosure include, but are not necessarily limited to, enteral, parenteral, and inhalational routes.

[0625] Parenteral routes of administration other than inhalation administration include, but are not necessarily limited to, topical, transdermal, subcutaneous, intramuscular, intraorbital, intracapsular, intraspinal, intrasternal, intratumoral, intralymphatic, peritumoral, and intravenous routes, i.e., any route of administration other than through the alimentary canal. Parenteral administration can be carried to effect systemic or local delivery of a TMMP of the present disclosure, a nucleic acid of the present disclosure, or a recombinant expression vector of the present disclosure. Where systemic delivery is desired, administration typically involves invasive or systemically absorbed topical or mucosal administration of pharmaceutical preparations.

### Combination Therapies

[0626] In some cases, a method of the present disclosure for treating cancer in an individual comprises: a) administering a TMMP of the present disclosure; and b) administering at least one additional therapeutic agent or therapeutic treatment. Suitable additional therapeutic agents include, but are not limited to, a small molecule cancer chemotherapeutic agent, and an immune checkpoint inhibitor. Suitable additional therapeutic treatments include, e.g., radiation, surgery (e.g., surgical resection of a tumor), and the like.

[0627] A treatment method of the present disclosure can comprise co-administration of a TMMP of the present disclosure and at least one additional therapeutic agent. By “co-administration” is meant that both a TMMP of the present disclosure and at least one additional therapeutic agent are administered to an individual, although not necessarily at the same time, in order to achieve a therapeutic effect that is the result of having administered both the TMMP and the at least one additional therapeutic agent. The administration of the TMMP and the at least one additional therapeutic agent can be substantially simultaneous, e.g., the TMMP can be administered to an individual within about 1 minute to about 24 hours (e.g., within about 1 minute, within about 5 minutes, within about 15 minutes, within about 30 minutes, within about 1 hour, within about 4 hours, within about 8 hours, within about 12 hours, or within about 24 hours) of administration of the at least one additional therapeutic agent. In some cases, a TMMP of the present disclosure is administered to an individual who is undergoing treatment with, or who has undergone treatment with, the at least one additional therapeutic agent. The administration of the TMMP can occur at different times and/or at different frequencies.

[0628] As an example, a treatment method of the present disclosure can comprise co-administration of a TMMP of the present disclosure and an immune checkpoint inhibitor such as an antibody specific for an immune checkpoint. By “co-administration” is meant that both a TMMP of the present disclosure and an immune checkpoint inhibitor (e.g., an antibody specific for an immune checkpoint polypeptide) are administered to an individual, although not necessarily at the same time, in order to achieve a therapeutic effect that is the result of having administered both the TMMP and the immune checkpoint inhibitor (e.g., an antibody specific for an immune checkpoint polypeptide). The administration of the TMMP and the immune checkpoint inhibitor (e.g., an antibody specific for an immune checkpoint polypeptide) can be substantially simultaneous, e.g., the TMMP can be administered to an individual within about 1 minute to about 24 hours (e.g., within about 1 minute, within about 5 minutes, within about 15 minutes, within about 30 minutes, within about 1 hour, within about 4 hours, within about 8 hours, within about 12 hours, or within about 24 hours) of administration of the immune checkpoint inhibitor (e.g., an antibody specific for an immune checkpoint polypeptide). In some cases, a TMMP of the present disclosure is administered to an individual who is undergoing treatment with, or who has undergone treatment with, an immune checkpoint inhibitor (e.g., an antibody specific for an immune checkpoint polypeptide). The administration of the TMMP and the immune checkpoint inhibitor (e.g., an antibody specific for an immune checkpoint polypeptide) can occur at different times and/or at different frequencies.

[0629] Exemplary immune checkpoint inhibitors include inhibitors that target an immune checkpoint polypeptide such as CD27, CD28, CD40, CD122, CD96, CD73, CD47, OX40, GITR, CSF1R, JAK, PI3K delta, PI3K gamma, TAM, arginase, CD137 (also known as 4-1BB), ICOS, A2AR, B7-H3, B7-H4, BTLA, CTLA-4, LAG3. TIM3, VISTA, CD96, TIGIT, CD122, PD-1, PD-L1 and PD-L2. In some cases, the immune checkpoint polypeptide is a stimulatory checkpoint molecule selected from CD27, CD28, CD40, ICOS. OX40, GITR, CD122 and CD137. In some cases, the immune checkpoint polypeptide is an inhibitory checkpoint molecule selected from A2AR, B7-H3, B7-H4, BTLA, CTLA-4, IDO, KIR, LAG3, PD-1, TIM3, CD96, TIGIT and VISTA.

[0630] In some cases, the immune checkpoint inhibitor is an antibody specific for an immune checkpoint polypeptide. In some cases, the anti-immune checkpoint antibody is a monoclonal antibody. In some cases, the anti-immune checkpoint antibody is humanized, or dc-immunized such that the antibody does not substantially elicit an immune response in a human. In some cases, the anti-immune checkpoint antibody is a humanized monoclonal antibody. In some cases, the anti-immune checkpoint antibody is a de-immunized monoclonal antibody. In some cases, the anti-immune checkpoint antibody is a fully human monoclonal antibody. In some cases, the anti-immune checkpoint antibody inhibits binding of the immune checkpoint polypeptide to a ligand for the immune checkpoint polypeptide. In some cases, the anti-immune checkpoint antibody inhibits binding of the immune checkpoint polypeptide to a receptor for the immune checkpoint polypeptide.

[0631] Suitable anti-immune checkpoint antibodies include, but are not limited to, nivolumab (Bristol-Myers Squibb), pembrolizumab (Merck), pidilizumab (Curetech), AMP-224 (GlaxoSmithKline/Amplimmune), MPDL3280A (Roche), MDX-1105 (Medarex, Inc./Bristol Myer Squibb), MEDI-4736 (Medimmune/AstraZeneca), arelumab (Merck Serono), ipilimumab (YERVOY, (Bristol-Myers Squibb), tremelimumab (Pfizer), pidilizumab (CureTech, Ltd.), IMP321 (Immutep S.A.), MGA271 (Macrogenics), BMS-986016 (Bristol-Meyers Squibb), lirilumab (Bristol-Myers Squibb), urelumab (Bristol-Meyers Squibb). PF-05082566 (Pfizer), IPH2101 (Innate Pharma/Bristol-Myers Squibb), MEDI-6469 (MedIimune/AZ), CP-870,893 (Genentech), Mogamulizumab (Kyowa Hakko Kirin), Varlilumab (CelIDex Therapeutics), Avelumab (EMD Serono), Galiximab (Biogen Idec), AMP-514 (Amplimmune/AZ), AUNP 12 (Aurigene and Pierre Fabre), Indoximod (NewLink Genetics), NLG-919 (NewLink Genetics), INCB024360 (Incyte); KN035; and combinations thereof. For example, in some cases, the immune checkpoint inhibitor is an anti-PD-1 antibody. Suitable anti-PD-1 antibodies include, e.g., nivolumab, pembrolizumab (also known as MK-3475), pidilizumab, SHR-1210, PDR001, and AMP-224. In some cases, the anti-PD-1 monoclonal antibody is nivolumab, pembrolizumab or PDR001. Suitable anti-PD1 antibodies are described in U.S. Patent Publication No. 2017/0044259. For pidilizumab, see, e.g., Rosenblatt et al. (2011) J. Immunother. 34:409-18. In some cases, the immune checkpoint inhibitor is an anti-CTLA-4 antibody. In some cases, the anti-CTLA-4 antibody is ipilimumab or tremelimumab. For tremelimumab, see, e.g., Ribas et al. (2013) J. Clin. Oncol. 31:616-22. In some cases, the immune checkpoint inhibitor is an anti-PD-L1 antibody. In some cases, the anti-PD-L1 monoclonal antibody is BMS-935559, MEDI4736, MPDL3280A (also known as RG7446), KN035, or MSB0010718C. In some embodiments, the anti-PD-L1 monoclonal antibody is MPDL3280A (atezolizumab) or MEDI4736 (durvalumab). For durvalumab, see, e.g., WO 2011/066389. For atezolizumab, see, e.g., U.S. Pat. No. 8,217,149.

### Subjects Suitable for Treatment

[0632] Subjects suitable for treatment with a method of the present disclosure include individuals who have cancer, including individuals who have been diagnosed as having cancer, individuals who have been treated for cancer but who failed to respond to the treatment, and individuals who have been treated for cancer and who initially responded but subsequently became refractory to the treatment. Subjects suitable for treatment with a method of the present disclosure include individuals who have an infection (e.g., an infection with a pathogen such as a bacterium, a virus, a protozoan, etc.), including individuals who have been diagnosed as having an infection, and individuals who have been treated for an infection but who failed to respond to the treatment. Subjects suitable for treatment with a method of the present disclosure include individuals who have bacterial infection, including individuals who have been diagnosed as having a bacterial infection, and individuals who have been treated for a bacterial infection but who failed to respond to the treatment. Subjects suitable for treatment with a method of the present disclosure include individuals who have a viral infection, including individuals who have been diagnosed as having a viral infection, and individuals who have been treated for a viral infection but who failed to respond to the treatment. Subjects suitable for treatment with a method of the present disclosure include individuals who have an autoimmune disease, including individuals who have been diagnosed as having an autoimmune disease, and individuals who have been treated for an autoimmune disease but who failed to respond to the treatment.

### Examples of Non-Limiting Aspects of the Disclosure

### Aspects Set A

[0633] Aspects, including embodiments, of the present subject matter described above may be beneficial alone or in combination, with one or more other aspects or embodiments. Without limiting the foregoing description, certain non-limiting aspects of the disclosure numbered 1-95 are provided below. As will be apparent to those of skill in the art upon reading this disclosure, each of the individually numbered aspects may be used or combined with any of the preceding or following individually numbered aspects. This is intended to provide support for all such combinations of aspects and is not limited to combinations of aspects explicitly provided below:

[0634] Aspect 1. T-cell modulatory multimeric polypeptide comprising: at least one heterodimer comprising: a) a first polypeptide comprising: i) a Wilms tumor-1 (WT-1) peptide epitope; and ii) first major histocompatibility complex (MHC) polypeptide; b) a second polypeptide comprising a second MHC polypeptide, and c) at least one immunomodulatory polypeptide, wherein the first and/or the second polypeptide comprises the immunomodulatory polypeptide.

[0635] Aspect 2. A T-cell modulatory multimeric polypeptide of aspect 1, wherein at least one of the one or more immunomodulatory domains is a variant immunomodulatory polypeptide that exhibits reduced affinity to a cognate co-immunomodulatory polypeptide compared to the affinity of a corresponding wild-type immunomodulatory polypeptide for the cognate co-immunomodulatory polypeptide, and wherein the epitope binds to a T-cell receptor (TCR) on a T cell with an affinity of at least 10⁻⁷ M, such that: i) the T-cell modulatory multimeric polypeptide binds to a first T cell with an affinity that is at least 25% higher than the affinity with which the T-cell modulatory multimeric polypeptide binds a second T cell, wherein the first T cell expresses on its surface the cognate co-immunomodulatory polypeptide and a TCR that binds the epitope with an affinity of at least 10⁻⁷ M, and wherein the second T cell expresses on its surface the cognate co-immunomodulatory polypeptide but does not express on its surface a TCR that binds the epitope with an affinity of at least 10⁻⁷ M; and/or ii) the ratio of the binding affinity of a control T-cell modulatory multimeric polypeptide, wherein the control comprises a wild-type immunomodulatory polypeptide, to a cognate co-immunomodulatory polypeptide to the binding affinity of the T-cell modulatory multimeric polypeptide comprising a variant of the wild-type immunomodulatory polypeptide to the cognate co-immunomodulatory polypeptide, when measured by bio-layer interferometry, is in a range of from 1.5:1 to 10⁶:1.

[0636] Aspect 3. A T-cell modulatory multimeric polypeptide of aspect 2, wherein: a) the T-cell modulatory multimeric polypeptide binds to the first T cell with an affinity that is at least 50%, at least 2-fold, at least 5-fold, or at least 10-fold higher than the affinity with which it binds the second T cell; and/or h) the variant immunomodulatory polypeptide binds the co-immunomodulatory polypeptide with an affinity of from about 10⁻⁴ M to about 10⁻⁷M, from about 10⁻⁴ M to about 10⁻⁶M, from about 10⁻⁴ M to about 10⁻⁵ M; and/or c) wherein the ratio of the binding affinity of a control T-cell modulatory multimeric polypeptide, wherein the control comprises a wild-type immunomodulatory polypeptide, to a cognate co-immunomodulatory polypeptide to the binding affinity of the T-cell modulatory multimeric polypeptide comprising a variant of the wild-type immunomodulatory polypeptide to the cognate co-immunomodulatory polypeptide, when measured by bio-layer interferometry, is at least 10:1, at least 50:1, at least 10²:1, or at least 10³:1.

[0637] Aspect 4. A T-cell modulatory multimeric polypeptide of any one of aspects 1-3, wherein the first or the second polypeptide comprises an immunoglobulin (Ig) Fe polypeptide.

[0638] Aspect 5. A T-cell modulatory multimeric polypeptide of aspect 4, wherein the Ig Fe polypeptide is an IgG1 Fc polypeptide.

[0639] Aspect 6. A T-cell modulatory multimeric polypeptide of aspect 5, wherein IgG1 Fc polypeptide comprises one or more amino acid substitutions selected from N297A, L234A, L235A, L234F, L235E, and P331S.

[0640] Aspect 7. A T-cell modulatory multimeric polypeptide of any one of aspects 1-6, wherein: a1) the first polypeptide comprises, in order from N-terminus to C-terminus: i) the WT-1 peptide epitope; ii) the first MHC polypeptide; and iii) at least one immunomodulatory polypeptide; and b2) the second polypeptide comprises, in order from N-terminus to C-terminus: i) the second MHC polypeptide; and ii) an immunoglobulin (Ig) Fe polypeptide; or a2) the first polypeptide comprises, in order from N-terminus to C-terminus: i) the WT-1 peptide epitope; and ii) the first MHC polypeptide; and b2) the second polypeptide comprises, in order from N-terminus to C-terminus: i) at least one immunomodulatory polypeptide; ii) the second MHC polypeptide; and iii) an Ig Fc polypeptide; or a3) the first polypeptide comprises, in order from N-terminus to C-terminus: i) the WT-1 peptide epitope; and ii) the first MHC polypeptide; and b3) the second polypeptide comprises, in order from N-terminus to C-terminus: i) the second MHC polypeptide; and ii) an Ig Fc polypeptide; and iii) at least one immunomodulatory polypeptide; or a4) the first polypeptide comprises, in order from N-terminus to C-terminus: i) the WT-1 peptide epitope; and ii) the first MHC polypeptide; and b4) the second polypeptide comprises, in order from N-terminus to C-terminus: i) the second MHC polypeptide; and ii) at least one immunomodulatory polypeptide; or a5) the first polypeptide comprises, in order from N-terminus to C-terminus: i) the WT-1 peptide epitope; and ii) the first MHC polypeptide; and b5) a second polypeptide comprises, in order from N-terminus to C-terminus: i) at least one immunomodulatory polypeptide; and ii) the second MHC polypeptide; or a6) the first polypeptide comprises, in order from N-terminus to C-terminus: i) the WT-1 peptide epitope; ii) the first MHC polypeptide; and iii) at least one immunomodulatory polypeptide; and b6) the second polypeptide comprises: i) the second MHC polypeptide.

[0641] Aspect 8, A T-cell modulatory multimeric polypeptide of any one of aspects 1-7, wherein the first polypeptide comprises a peptide linker between the WT-1 epitope and the first MHC polypeptide and/or wherein the second polypeptide comprises a peptide linker between the immunomodulatory polypeptide and the second MHC polypeptide.

[0642] Aspect 9. A T-cell modulatory multimeric polypeptide of aspect 8, wherein the peptide linker comprises the amino acid sequence (GGGGS)n (SEQ ID NO:284), where n is an integer from 1 to 10.

[0643] Aspect 10. A T-cell modulatory multimeric polypeptide of any one of aspects 1-9, wherein the first MHC polypeptide is a P2-microglobulin polypeptide; and wherein the second MHC polypeptide is an MHC class I heavy chain polypeptide.

[0644] Aspect 11. A T-cell modulatory multimeric polypeptide of any one of aspects 1-10, wherein the at least one immunomodulatory polypeptide is selected from the group consisting of a cytokine (e.g., an IL2 polypeptide, an IL7 polypeptide, an IL12 polypeptide, an IL15 polypeptide, an IL17 polypeptide, an IL21 polypeptide, an 1127 polypeptide, an IL-23 polypeptide, a TGFβ polypeptide, and the like; and including all family members, e.g., IL17A, IL-17B, IL-17C, IL-17D, IL-17E, IL-17F, IL-17E), a 4-1BBL polypeptide, an ICOS-L polypeptide, an OX-40L polypeptide, a CD80 polypeptide, a CD86 polypeptide, (CD80 and CD86 are also known as B7-1 and B7-2, respectively), a CD40 polypeptide, a CD70 polypeptide, a JAG1 (CD339) polypeptide, an ICAM (CD540 polypeptide, a PD-L1 polypeptide, a FasL polypeptide, a PD-L2 polypeptide, a PD-1H (VISTA) polypeptide, an ICOS-L (CD275) polypeptide, a GITRL polypeptide, an HVEM polypeptide, a CXCL10 polypeptide, a CXCL9 polypeptide, a CXCL11 polypeptide, a CXCL13 polypeptide, and a CX3CL1 polypeptide, a Galectin-9 polypeptide, a CD83 polypeptide, a CD30L polypeptide, a HLA-G polypeptide, a MICA polypeptide, a MICB polypeptide, a HVEM (CD270) polypeptide, a lymphotoxin beta receptor polypeptide, a 3/TR6 polypeptide, an ILT3 polypeptide, an ILT4 polypeptide, a CXCL10 polypeptide, a CXCL9 polypeptide, a CXCL11 polypeptide, a CXCL13 polypeptide, and a CX3CL1 polypeptide, and combinations thereof.

[0645] Aspect 12. A T-cell modulatory multimeric polypeptide of any one of aspects 1-11, wherein the at least one immunomodulatory polypeptide is an IL-2 polypeptide.

[0646] Aspect 13. A T-cell modulatory multimeric polypeptide of any one of aspects 1-12, wherein the multimeric polypeptide comprises at least two immunomodulatory polypeptides, and wherein at least two of the immunomodulatory polypeptides are the same.

[0647] Aspect 14. A T-cell modulatory multimeric polypeptide of aspect 13, wherein the 2 or more immunomodulatory polypeptides are in tandem.

[0648] Aspect 15. A T-cell modulatory multimeric polypeptide of any one of aspects 1-14, wherein the first polypeptide and the second polypeptide are covalently linked to one another.

[0649] Aspect 16. A T-cell modulatory multimeric polypeptide of aspect 15, wherein the covalent linkage is via a disulfide bond.

[0650] Aspect 17. A T-cell modulatory multimeric polypeptide of any one of aspects 1-16, wherein the first MHC polypeptide or a linker between the epitope and the first MHC polypeptide comprises an amino acid substitution to provide a first Cys residue, wherein the second MHC polypeptide comprises an amino acid substitution to provide a second Cys residue, and wherein the disulfide linkage is between the first and the second Cys residues.

[0651] Aspect 18. A T-cell modulatory multimeric polypeptide of any one of aspects 1-17, wherein the WT-1 peptide epitope has a length of from about 4 amino acids to about 25 amino acids.

[0652] Aspect 19. A T-cell modulatory multimeric polypeptide of any one of aspects 1-18, wherein the WT-1 peptide epitope comprises an amino acid sequence selected from the group consisting of: NLMNLGATL (SEQ ID NO:258), NYMNLGATL (SEQ ID NO:263), CMTWNQMNLGATLKG (SEQ ID NO:223), WNQMNLGATLKGVAA (SEQ ID NO:224), CMTWNYMNLGATLKG (SEQ ID NO:225), WNYMNLGATLKGVAA (SEQ ID NO:226), MTWNQMNLGATLKGV (SEQ ID NO:227), TWNQMNLGATLKGVA (SEQ ID NO:228), CMTWNLMNLGATLKG (SEQ ID NO:229), MTWNLMNLGATLKGV (SEQ ID NO:230), TWNLMNLGATLKGVA (SEQ ID NO:231), WNLMNLGATLKGVAA (SEQ ID NO:232), MNLGATLK (SEQ ID NO:233), MTWNYMNLGATLKGV SEQ ID NO:234), TWNYMNLGATLKGVA (SEQ ID NO:235), CMTWNQMNLGATLKGVA (SEQ ID NO:236), CMTWNLMNLGATLKGVA (SEQ ID NO:237). CMTWNYMNLGATLKGVA (SEQ ID NO:238), GYLRNPTAC (SEQ ID NO:239), GALRNPTAL (SEQ ID NO:240), YALRNPTAC (SEQ ID NO:241), GLLRNPTAC (SEQ ID NO:242), RYRPHPGAL (SEQ ID NO:243), YQRPHPGAL (SEQ ID NO:244), RLRPHPGAL (SEQ ID NO:245), RIRPHPGAL (SEQ ID NO:246), QFPNHSFKHEDPMGQ (SEQ ID NO:247), HSFKHEDPY (SEQ ID NO:248), QFPNHSFKHEDPM (SEQ ID NO:249), QFPNHSFKHEDPY (SEQ ID NO:250), KRPFMCAYPGCNK (SEQ ID NO:251), KRPFMCAYPGCYK (SEQ ID NO:252), FMCAYPGCY (SEQ ID NO:253), FMCAYPGCK (SEQ ID NO:254), KRPFMCAYPGCNKRY (SEQ ID NO:255), SEKRPFMCAYPGCNK (SEQ ID NO:256), KRPFMCAYPGCYKRY (SEQ ID NO:257), NLMNLGATL (SEQ ID NO:258), VLDFAPPGA (SEQ ID NO:259), RMFPNAPYL (SEQ ID NO:260), CMTWNQMN (SEQ ID NO:261), CYTWNQMNL (SEQ 1D NO:269), NYMNLGATL (SEQ ID NO:263), YMFPNAPYL (SEQ ID NO:264), SLGEQQYSV (SEQ ID NO:265), CMTWNQMNL (SEQ ID NO:266), and NQMNLGATL (SEQ ID NO:267).

[0653] Aspect 20. A T-cell modulatory multimeric polypeptide of any one of aspects 1-18, wherein the WT-1 peptide comprises the amino acid sequence CMTWNQMNL (SEQ ID NO:266) or CYTWNQMNL (SEQ ID NO:269).

[0654] Aspect 21. A T-cell modulatory multimeric polypeptide of any one of aspects 1-20, wherein the first or the second MHC polypeptide comprises: a) an amino acid sequence having at least 95% amino acid sequence identity to the HLA-A*0101, HLA-A*0201, HLA-A*0201, HLA-A*1101, HLA-A*2301, HLA-A*2402, HLA-A*2407, HLA-A*3303, or HLA-A*3401 amino acid sequence depicted in FIG. 9A; or b) an amino acid sequence having at least 95% amino acid sequence identity to the HLA-B*0702, HLA-B*0801, HLA-B*1502, HLA-B*3802, HLA-B*4001, HLA-B*4601, or HLA-B*5301 amino acid sequence depicted in FIG. 10A; or c) an amino acid sequence having at least 95% amino acid sequence identity to the HLA-C*0102, HLA-C*0303, HLA-C*0304, HLA-C*0401, HLA-C*0602, HLA-C*0701, HLA-C*0702, HLA-C*0801, or HLA-C*1502 depicted in FIG. 1 IA.

[0655] Aspect 22. A T-cell modulatory multimeric polypeptide of any one of aspects 1-20, wherein the first MHC polypeptide is a β2M polypeptide, and wherein the second MHC polypeptide comprises an amino acid sequence having at least 95% amino acid sequence identity to an HLA-A*2402 polypeptide.

[0656] Aspect 23. A T-cell modulatory multimeric polypeptide of any one of aspects 1-20, wherein the first MHC polypeptide is a β2M polypeptide, and wherein the second MHC polypeptide is an HLA-A*1101 polypeptide.

[0657] Aspect 24. A T-cell modulatory multimeric polypeptide of any one of aspects 1-20, wherein the first MHC polypeptide is a β2M polypeptide, and wherein the second MHC polypeptide comprises an amino acid sequence having at least 95% amino acid sequence identity to an HLA-A*3303 polypeptide.

[0658] Aspect 25. A T-cell modulatory multimeric polypeptide of any one of aspects 1-20, wherein the first MHC polypeptide is a β2M polypeptide, and wherein the second MHC polypeptide comprises an amino acid sequence having at least 95% amino acid sequence identity to an HLA-A*0201 polypeptide.

[0659] Aspect 26. A T-cell modulatory multimeric polypeptide of any one of aspects 21-25, wherein the MHC heavy chain polypeptide comprises a Cys at position 236.

[0660] Aspect 27. A T-cell modulatory multimeric polypeptide of any one of aspects 21-26, wherein the β2M polypeptide comprises a Cys at position 12.

[0661] Aspect 28. A T-cell modulatory multimeric polypeptide of any one of aspects 1-27, wherein the immunomodulatory polypeptide is a variant IL-2 polypeptide comprising: i) an H16A substitution and an F42A substation; or ii) an H16T substitution and an F42A substitution.

[0662] Aspect 29. A T-cell modulatory multimeric polypeptide of any one of aspects 4-28, wherein the multimeric polypeptide comprises a first and a second heterodimer, and wherein the first and second heterodimers are covalently bound by one or more disulfide bonds between the Ig Fc polypeptides of the first and second heterodimers.

[0663] Aspect 30. A nucleic acid comprising a nucleotide sequence encoding a first or second polypeptide according to any one of aspects 1-28, wherein the first or second polypeptide comprises at least one immunomodulatory domain.

[0664] Aspect 31. An expression vector comprising the nucleic acid of aspect 30.

[0665] Aspect 32. A method of selectively modulating the activity of T cell specific for a Wilms tumor-1 (WT-1) epitope, the method comprising contacting the T cell with a T-cell modulatory multimeric polypeptide according to any one of aspects 1-29, wherein said contacting selectively modulates the activity of the WT-1 epitope-specific T cell.

[0666] Aspect 22. A method of treating a patient having a cancer, the method comprising administering to the patient an effective amount of a pharmaceutical composition comprising T-cell modulatory multimeric polypeptide according to any one of aspects 1-29.

[0667] Aspect 34. The method of aspect 33, wherein the cancer is hepatocellular carcinoma, pancreatic cancer, stomach cancer, colorectal cancer, hepatoblastoma, or an ovarian yolk sac tumor.

[0668] Aspect 35. The method of aspect 33 or aspect 34, wherein said administering is intramuscular.

[0669] Aspect 36. The method of aspect 33 or aspect 34, wherein said administering is intravenous.

[0670] Aspect 37. A method of modulating an immune response in an individual, the method comprising administering to the individual an effective amount of the T-cell modulatory multimeric polypeptide (TMMP) of any one of aspects 1-29, wherein said administering induces an epitope-specific T cell response (e.g., a T cell response specific for the WT-1 epitope present in the TMMP) and an epitope-non-specific T cell response, wherein the ratio of the epitope-specific T cell response to the epitope-non-specific T cell response is at least 2:1.

[0671] Aspect 38 The method of aspect 37, wherein the ratio of the epitope-specific T cell response to the epitope-non-specific T cell response is at least 5:1.

[0672] Aspect 39. The method of aspect 37, wherein the ratio of the epitope-specific T cell response to the epitope-non-specific T cell response is at least 10:1.

[0673] Aspect 40. The method of aspect 37, wherein the ratio of the epitope-specific T cell response to the epitope-non-specific T cell response is at least 25:1.

[0674] Aspect 41. The method of aspect 37, wherein the ratio of the epitope-specific T cell response to the epitope-non-specific T cell response is at least 50:1.

[0675] Aspect 42. The method of aspect 37, wherein the ratio of the epitope-specific T cell response to the epitope-non-specific T cell response is at least 100:1.

[0676] Aspect 43. The method of any one of aspects 37-42, wherein the individual is a human.

[0677] Aspect 44. The method of any one of aspects 37-43, wherein said modulating comprises increasing a cytotoxic T-cell response to a cancer cell (e.g., a WT-1-expressing cancer cell).

[0678] Aspect 45, The method of any one of aspects 37-44, wherein said administering is intravenous, subcutaneous, intramuscular, systemic, intralymphatic, distal to a treatment site, local, or at or near a treatment site.

[0679] Aspect 46. The method of any one of aspects 37-45, wherein the epitope non-specific T-cell response is less than the epitope non-specific T-cell response that would be induced by a control T-cell modulatory multimeric polypeptide comprising a corresponding wild-type immunomodulatory polypeptide.

[0680] Aspect 47. A method of delivering a costimulatory (i.e., immunomodulatory) polypeptide selectively to target T cell, the method comprising contacting a mixed population of T cells with a T-cell modulatory multimeric polypeptide (TMMP) of any one of aspects 1-29, wherein the mixed population of T cells comprises the target T cell and non-target T cells, wherein the target T cell is specific for the epitope present within the TMMP (e.g., wherein the target T cell is specific for the WT-1 epitope present within the TMMP), and wherein said contacting delivers the one or more costimulatory polypeptides present within the TMMP to the target T cell.

[0681] Aspect 48. The method of aspect 47, wherein the population of T cells is in vitro.

[0682] Aspect 49. The method of aspect 47, wherein the population of T cells is in vivo in an individual.

[0683] Aspect 50. The method of aspect 49, comprising administering the multimeric polypeptide to the individual.

[0684] Aspect 51. The method of any one of aspects 47-50, wherein the target T cell is a cytotoxic T cell.

[0685] Aspect 52. The method of aspect 47, wherein the mixed population of T cells is an in vitro population of mixed T cells obtained from an individual, and wherein said contacting results in activation and/or proliferation of the target T cell, generating a population of activated and/or proliferated target T cells.

[0686] Aspect 53. The method of aspect 52, further comprising administering the population of activated and/or proliferated target T cells to the individual.

[0687] Aspect 54. A method of detecting, in a mixed population of T cells obtained from an individual, the presence of a target T cell that binds a WT-1 epitope of interest, the method comprising: a) contacting in vitro the mixed population of T cells with T-cell modulatory multimeric polypeptide (TMMP) of any one of aspects 1-29, wherein the TMMP comprises the WT-1 epitope of interest; and b) detecting activation and/or proliferation of T cells in response to said contacting, wherein activated and/or proliferated T cells indicates the presence of the target T cell.

[0688] Aspect 55. A T-cell modulatory multimeric polypeptide comprising: at least one heterodimer comprising: a) a first polypeptide comprising: i) a Wilms tumor-1 (WT-1) peptide epitope, wherein the WT-1 peptide has a length of from about 4 amino acids to about 25 amino acids; and ii) first major histocompatibility complex (MHC) class I polypeptide; b) a second polypeptide comprising a second MHC class I polypeptide, and c) at least one immunomodulatory polypeptide, wherein the first and/or the second polypeptide comprises the immunomodulatory polypeptide, and wherein the first and the second polypeptides are covalently linked to one another via at least 2 disulfide bonds.

[0689] Aspect 56. A T-cell modulatory multimeric polypeptide of aspect 55, wherein at least one of the at least one immunomodulatory polypeptides is a variant immunomodulatory polypeptide that exhibits reduced affinity to a cognate co-immunomodulatory polypeptide compared to the affinity of a corresponding wild-type immunomodulatory polypeptide for the cognate co-immunomodulatory polypeptide, and wherein the epitope binds to a T-cell receptor (TCR) on a T cell with an affinity of at least 10⁻⁷ M, such that: i) the T-cell modulatory multimeric polypeptide binds to a first T cell with an affinity that is at least 25% higher than the affinity with which the T-cell modulatory multimeric polypeptide binds a second T cell, wherein the first T cell expresses on its surface the cognate co-immunomodulatory polypeptide and a TCR that binds the epitope with an affinity of at least 10⁻⁷ M, and wherein the second T cell expresses on its surface the cognate co-immunomodulatory polypeptide but does not express on its surface a TCR that binds the epitope with an affinity of at least 10⁻⁷ M; and/or ii) the ratio of the binding affinity of a control T-cell modulatory multimeric polypeptide, wherein the control comprises a wild-type immunomodulatory polypeptide, to a cognate co-immunomodulatory polypeptide to the binding affinity of the T-cell modulatory multimeric polypeptide comprising a variant of the wild-type immunomodulatory polypeptide to the cognate co-immunomodulatory polypeptide, when measured by bio-layer interferometry, is in a range of from 1.5:1 to 10⁶:1.

[0690] Aspect 57. A T-cell modulatory multimeric polypeptide of aspect 56, wherein: a) the T-cell modulatory multimeric polypeptide binds to the first T cell with an affinity that is at least 50%, at least 2-fold, at least 5-fold, or at least 10-fold higher than the affinity with which it binds the second T cell; and/or b) the variant immunomodulatory polypeptide binds the co-immunomodulatory polypeptide with an affinity of from about 10⁻⁴ M to about 10⁻⁷ M, from about 10⁻⁴ M to about 10⁻⁶ M, from about 10⁻⁴ M to about 10⁻⁵M; and/or c) wherein the ratio of the binding affinity of a control T-cell modulatory multimeric polypeptide, wherein the control comprises a wild-type immunomodulatory polypeptide, to a cognate co-immunomodulatory polypeptide to the binding affinity of the T-cell modulatory multimeric polypeptide comprising a variant of the wild-type immunomodulatory polypeptide to the cognate co-immunomodulatory polypeptide, when measured by bio-layer interferometry, is at least 10:1, at least 50:1, at least 10²:1, or at least 10³:1.

[0691] Aspect 58. A T-cell modulatory multimeric polypeptide of any one of aspects 55-57, wherein the first or the second polypeptide comprises an immunoglobulin (Ig) Fc polypeptide.

[0692] Aspect 59. A T-cell modulatory multimeric polypeptide of aspect 58, wherein the Ig Fc polypeptide is an IgG1 Fc polypeptide.

[0693] Aspect 60. A T-cell modulatory multimeric polypeptide of aspect 58, wherein the Ig Fc polypeptide is an IgG4 Fc polypeptide.

[0694] Aspect 61. T-cell modulatory multimeric polypeptide of aspect 59, wherein IgG1 Fc polypeptide comprises one or more amino acid substitutions selected from N297A, L234A, L235A, L234F, L235E, and P331S.

[0695] Aspect 62. A T-cell modulatory multimeric polypeptide of any one of aspects 55-61, wherein

a1) the first polypeptide comprises, in order from N-terminus to C-terminus:

[0696] i) the WT-1 peptide epitope;

[0697] ii) the first class I MHC polypeptide; and

[0698] iii) at least one immunomodulatory polypeptide; and

b1) the second polypeptide comprises, in order from N-terminus to C-terminus:

[0699] i) the second class I MHC polypeptide; and

[0700] ii) an immunoglobulin (Ig) Fc polypeptide; or

a2) the first polypeptide comprises, in order from N-terminus to C-terminus:

[0701] i) the WT-1 peptide epitope; and

[0702] ii) the first class I MHC polypeptide; and

b2) the second polypeptide comprises, in order from N-terminus to C-terminus:

[0703] i) at least one immunomodulatory polypeptide;

[0704] ii) the second class I MHC polypeptide; and

[0705] iii) an Ig Fc polypeptide; or

a3) the first polypeptide comprises, in order from N-terminus to C-terminus:

[0706] i) the WT-1 peptide epitope; and

[0707] ii) the first class I MHC polypeptide; and

b3) the second polypeptide comprises, in order from N-terminus to C-terminus:

[0708] i) the second class I MHC polypeptide; and

[0709] ii) an Ig Fc polypeptide; and

[0710] iii) at least one immunomodulatory polypeptide; or

a4) the first polypeptide comprises, in order from N-terminus to C-terminus:

[0711] i) the WT-1 peptide epitope; and

[0712] ii) the first class I MHC polypeptide; and

b4) the second polypeptide comprises, in order from N-terminus to C-terminus:

[0713] i) the second class I MHC polypeptide; and

[0714] ii) at least one immunomodulatory polypeptide; or

a5) the first polypeptide comprises, in order from N-terminus to C-terminus:

[0715] i) the WT-1 peptide epitope; and

[0716] ii) the first class I MHC polypeptide; and

b5) a second polypeptide comprises, in order from N-terminus to C-terminus:

[0717] i) at least one immunomodulatory polypeptide; and

[0718] ii) the second class I MHC polypeptide; or

a6) the first polypeptide comprises, in order from N-terminus to C-terminus:

[0719] i) the WT-1 peptide epitope;

[0720] ii) the first class I MHC polypeptide; and

[0721] iii) at least one immunomodulatory polypeptide; and

b6) the second polypeptide comprises:

[0722] i) the second class I MHC polypeptide.

[0723] Aspect 63. A T-cell modulatory multimeric polypeptide of any one of aspects 55-62, wherein the first MHC polypeptide is a β2-microglobulin polypeptide; and wherein the second MHC polypeptide is an MHC class I heavy chain polypeptide.

[0724] Aspect 64. A T-cell modulatory multimeric polypeptide of any one of aspects 55-63, wherein the at least one immunomodulatory polypeptide is selected from the group consisting of a cytokine (e.g., an IL2 polypeptide, an IL7 polypeptide, an IL12 polypeptide, an IL15 polypeptide, an IL17 polypeptide, an IL21 polypeptide, an IL27 polypeptide, an IL-23 polypeptide, a TGFβ polypeptide, and the like; and including all family members, e.g., IL17A, IL-17B, IL-17C, IL-17D, IL-17E, IL-17F, IL-17E), a 4-1BBL polypeptide, an ICOS-L polypeptide, an OX-40L, polypeptide, a CD80 polypeptide, a CD86 polypeptide, (CD80 and CD86 are also known as B7-1 and B7-2, respectively), a CD40 polypeptide, a CD70 polypeptide, a JAG1 (CD339) polypeptide, an ICAM (CD540 polypeptide, a PD-L1 polypeptide, a FasL polypeptide, a PD-L2 polypeptide, a PD-1H (VISTA) polypeptide, an ICOS-L (CD275) polypeptide, a GITRL polypeptide, an HVEM polypeptide, a CXCL10 polypeptide, a CXCL9 polypeptide, a CXCL11 polypeptide, a CXCL13 polypeptide, and a CX3CL1 polypeptide, a Galectin-9 polypeptide, a CD83 polypeptide, a CD30L polypeptide, a HLA-G polypeptide, a MICA polypeptide, a MICB polypeptide, a HVEM (CD270) polypeptide, a lymphotoxin beta receptor polypeptide, a 3/TR6 polypeptide, an ILT3 polypeptide, an ILT4 polypeptide, a CXCL10 polypeptide, a CXCL9 polypeptide, a CXCL11 polypeptide, a CXCL13 polypeptide, and a CX3CL1 polypeptide, and combinations thereof.

[0725] Aspect 65. A T-cell modulatory multimeric polypeptide of any one of aspects 55-63, wherein the at least one immunomodulatory polypeptide is an IL-2 polypeptide.

[0726] Aspect 66. A T-cell modulatory multimeric polypeptide of any one of aspects 55-65, wherein the multimeric polypeptide comprises at least two immunomodulatory polypeptides, and wherein at least two of the immunomodulatory polypeptides are the same.

[0727] Aspect 67. A T-cell modulatory multimeric polypeptide of aspect 66, wherein the 2 or more immunomodulatory polypeptides are in tandem.

[0728] Aspect 68. The T-cell modulatory multimeric polypeptide of any one of aspects 55-67, wherein: a) a first disulfide bond is between: i) a Cys present in a linker between the WT-1 peptide epitope and the first MHC class I polypeptide, wherein the first MHC class I polypeptide is a β2M polypeptide; and ii) a Cys residue introduced via a Y84C substitution in the second MHC class I polypeptide, wherein the second MHC class I polypeptide is a MHC Class I heavy chain polypeptide; and b) a second disulfide bond is between: i) a Cys residue introduced into the β2M polypeptide via an R12C substitution; and ii) a Cys residue introduced into the MHC Class I heavy chain polypeptide via an A236C substitution.

[0729] Aspect 69. A T-cell modulatory multimeric polypeptide of aspect 68, wherein the linker comprises the amino acid sequence GCGGS (SEQ ID NO:318).

[0730] Aspect 70. A T-cell modulatory multimeric polypeptide of aspect 69, wherein the linker comprises the amino acid sequence GCGGS(GGGGS)n (SEQ ID NO:342), where n is an integer from 1 to 10.

[0731] Aspect 71. A T-cell modulatory multimeric polypeptide of any one of aspects 55-70, wherein the WT-1 peptide epitope has a length of from about 4 amino acids to about 15 amino acids.

[0732] Aspect 72. A T-cell modulatory multimeric polypeptide of any one of aspects 55-71, wherein the WT-1 peptide epitope comprises an amino acid sequence selected from the group consisting of: NLMNLGATL (SEQ ID NO:258), NYMNLGATL (SEQ ID NO:263), CMTWNQMNLGATLKG (SEQ ID NO:223), WNQMNLGATLKGVAA (SEQ ID NO:224), CMTWNYMNLGATLKG (SEQ ID NO:225). WNYMNLGATLKGVAA (SEQ ID NO:226), MTWNQMNLGATLKGV (SEQ ID NO:227), TWNQMNLGATLKGVA (SEQ ID NO:228), CMTWNLMNLGATLKG (SEQ ID NO:229), MTWNLMNLGATLKGV (SEQ ID NO:230), TWNLMNLGATLKGVA (SEQ ID NO:231), WNLMNLGATLKGVAA (SEQ ID NO:232), MNLGATLK (SEQ ID NO:233), MTWNYMNLGATLKGV SEQ ID NO:234), TWNYMNLGATLKGVA (SEQ ID NO:235), CMTWNQMNLGATLKGVA (SEQ ID NO:236), CMTWNLMNLGATLKGVA (SEQ ID NO:237), CMTWNYMNLGATLKGVA (SEQ ID NO:238), GYLRNPTAC (SEQ ID NO:239), GALRNPTAL (SEQ ID NO:240), YALRNPTAC (SEQ ID NO:241), GLLRNPTAC (SEQ ID NO:242), RYRPHPGAL (SEQ ID NO:243), YQRPHPGAL (SEQ ID NO:244), RLRPHPGAL (SEQ ID NO:245), RIRPHPGAL (SEQ ID NO:246), QFPNHSFKHEDPMGQ (SEQ ID NO:247), HSFKHEDPY (SEQ ID NO:248), QFPNHSFKHEDPM (SEQ ID NO:249), QFPNHSFKHEDPY (SEQ ID NO:250), KRPFMCAYPGCNK (SEQ ID NO:251), KRPFMCAYPGCYK (SEQ ID NO:252), FMCAYPGCY (SEQ ID NO:253), FMCAYPGCK (SEQ ID NO:254), KRPFMCAYPGCNKRY (SEQ ID NO:255), SEKRPFMCAYPGCNK (SEQ ID NO:256), KRPFMCAYPGCYKRY (SEQ ID NO:257), NLMNLGATL (SEQ ID NO:258), VLDFAPPGA (SEQ ID NO:259), RMFPNAPYL (SEQ ID NO:260), CMTWNQMN (SEQ ID NO:261), CYTWNQMNL (SEQ ID NO:269), NYMNLGATL (SEQ ID NO:263), YMFPNAPYL (SEQ ID NO:264), SLGEQQYSV (SEQ ID NO:265), CMTWNQMNL (SEQ ID NO:266), and NQMNLGATL (SEQ ID NO:267).

[0733] Aspect 73. A T-cell modulatory multimeric polypeptide of any one of aspects 55-71, wherein the WT-1 peptide comprises the amino acid sequence VLDFAPPGA (SEQ ID NO:259) or RMFPNAPYL (SEQ ID NO:260).

[0734] Aspect 74. A T-cell modulatory multimeric polypeptide of any one of aspects 55-73, wherein the first or the second MHC class I polypeptide comprises: a) an amino acid sequence having at least 95% amino acid sequence identity to the HLA-A*0101, HLA-A*0201, HLA-A*0201, HLA-A*1101, HLA-A*2301, HLA-A*2402, HLA-A*2407, HLA-A*3303, or HLA-A*3401 amino acid sequence depicted in FIG. 9A; or b) an amino acid sequence having at least 95% amino acid sequence identity to the HLA-B*0702, HLA-B*0801, HLA-B*1502, HLA-B*3802, HLA-B*4001, HLA-1B*4601, or HLA-B*5301 amino acid sequence depicted in FIG. 10A; or c) an amino acid sequence having at least 95% amino acid sequence identity to the HLA-C*0102, HLA-C*0303, HLA-C*0304, HLA-C*0401, HLA-C*0602, HLA-C*0701, HLA-C*0702, HLA-C*0801, or HLA-C*1502 depicted in FIG. 11A.

[0735] Aspect 75. A T-cell modulatory multimeric polypeptide of any one of aspects 55-74, wherein the first MHC polypeptide is a β2M polypeptide, and wherein the second MHC polypeptide comprises an amino acid sequence having at least 95% amino acid sequence identity to an HLA-A*2402 polypeptide.

[0736] Aspect 76. A T-cell modulatory multimeric polypeptide of any one of aspects 55-74, wherein the first MHC polypeptide is a β2M polypeptide, and wherein the second MHC polypeptide is an HLA-A*1101 polypeptide.

[0737] Aspect 77. A T-cell modulatory multimeric polypeptide of any one of aspects 55-74, wherein the first MHC polypeptide is a β2M polypeptide, and wherein the second MHC polypeptide comprises an amino acid sequence having at least 95% amino acid sequence identity to an HLA-A*3303 polypeptide.

[0738] Aspect 78. A T-cell modulatory multimeric polypeptide of any one of aspects 55-74, wherein the first MHC polypeptide is a β2M polypeptide, and wherein the second MHC polypeptide comprises an amino acid sequence having at least 95% amino acid sequence identity to an HLA-A*0201 polypeptide.

[0739] Aspect 79. A T-cell modulatory multimeric polypeptide of any one of aspects 55-78, wherein the at least one immunomodulatory polypeptide is a variant IL-2 polypeptide comprising: i) an H16A substitution and an F42A substation; or ii) an H16T substitution and an F42A substitution.

[0740] Aspect 80. A T-cell modulatory multimeric polypeptide of any one of aspects 55-79, wherein the multimeric polypeptide comprises a first and a second heterodimer.

[0741] Aspect 81. A nucleic acid comprising a nucleotide sequence encoding a first or second polypeptide according to any one of aspects 55-80, wherein the first or second polypeptide comprises at least one immunomodulatory domain.

[0742] Aspect 82. An expression vector comprising the nucleic acid of aspect 81.

[0743] Aspect 83. A method of selectively modulating the activity of T cell specific for a Wilms tumor-1 (WT-1) epitope, the method comprising contacting the T cell with a T-cell modulatory multimeric polypeptide according to any one of aspects 55-80, wherein said contacting selectively modulates the activity of the WT-1 epitope-specific T cell.

[0744] Aspect 84. A method of treating a patient having a cancer, the method comprising administering to the patient an effective amount of a pharmaceutical composition comprising T-cell modulatory multimeric polypeptide according to any one of aspects 55-80.

[0745] Aspect 85. The method of aspect 84, wherein the cancer expresses a WT-1 protein.

[0746] Aspect 86. The method of aspect 84 or aspect 85, wherein the cancer is acute myeloid leukemia, myeloma, ovarian cancer, pancreatic cancer, non-small cell lung cancer, colorectal cancer, breast cancer, Wilms tumor, mesothelioma, soft tissue sarcoma, neuroblastoma, or nephroblastoma.

[0747] Aspect 87. The method of any one of aspects 84-86, wherein said administering is intramuscular.

[0748] Aspect 88. The method of any one of aspects 84-86, wherein said administering is intravenous.

[0749] Aspect 89. A method of any one of aspects 84-88, further comprising administering one or more checkpoint inhibitors to the individual.

[0750] Aspect 90. A method according to aspect 89, wherein the checkpoint inhibitor is an antibody that binds to a polypeptide selected from the group consisting of CD27, CD28, CD40, CD122, CD96, CD73, CD47, OX40, GITR, CSF1R, JAK, PI3K delta, PI3K gamma, TAM, arginase, CD137, ICOS, A2AR, B7-1-13, B7-H4, BTLA, CTLA-4, LAG3, TIM3, VISTA, CD96, TIGIT, CD122, PD-1, PD-L1, and PD-L2.

[0751] Aspect 91. A method according to aspect 90, wherein the checkpoint inhibitor is an antibody specific for PD-1, PD-L1, or CTLA4.

[0752] Aspect 92. A method according to aspect 89, wherein the one or more checkpoint inhibitors is selected from the group consisting of nivolumab, pembrolizumah, pidilizumah, AMP-224, MPDL3280A, MDX-1105, MEDI-4736, arelumab, ipilimumab, tremelimumab, pidilizumab, IMP321, MGA271, BMS-986016, lirilumab, urelumab, PF-05082566, IPH2101, MEDI-6469, CP-870,893, Mogamulizumab, Varlilumab, Avelumab, Galiximab. AMP-514, AUNP 12, Indoximod, NLG-919, INCB024360, KN035, and combinations thereof.

[0753] Aspect 93. A method of modulating an immune response in an individual, the method comprising administering to the individual an effective amount of the T-cell modulatory multimeric polypeptide of any one of aspects 55-80, wherein said administering induces an epitope-specific T cell response and an epitope-non-specific T cell response, wherein the ratio of the epitope-specific T cell response to the epitope-non-specific T cell response is at least 2:1.

[0754] Aspect 94. A method of delivering an immunomodulatory polypeptide selectively to a target T cell, the method comprising contacting a mixed population of T cells with a T-cell modulatory multimeric polypeptide of any one of aspects 55-80, wherein the mixed population of T cells comprises the target T cell and non-target T cells, wherein the target T cell is specific for the WT-1 epitope present within the T-cell modulatory multimeric polypeptide, and wherein said contacting delivers the one or more immunomodulatory polypeptides present within the T-cell modulatory multimeric polypeptide to the target T cell.

[0755] Aspect 95. A method of detecting, in a mixed population of T cells obtained from an individual, the presence of a target T cell that binds a Wilms tumor-1 (WT-1) epitope, the method comprising: a) contacting in vitro the mixed population of T cells with the T-cell modulatory multimeric polypeptide of any one of aspects 55-80, wherein the T-cell modulatory multimeric polypeptide comprises the WT-1 epitope; and b) detecting activation and/or proliferation of T cells in response to said contacting, wherein activated and/or proliferated T cells indicates the presence of the target T cell.

### Aspects Set B

[0756] Aspects, including embodiments, of the present subject matter described above may be beneficial alone or in combination, with one or more other aspects or embodiments. Without limiting the foregoing description, certain non-limiting aspects of the disclosure numbered 1-36 are provided below. As will be apparent to those of skill in the art upon reading this disclosure, each of the individually numbered aspects may be used or combined with any of the preceding or following individually numbered aspects. This is intended to provide support for all such combinations of aspects and is not limited to combinations of aspects explicitly provided below:

[0757] Aspect 1. A T-cell modulatory multimeric polypeptide comprising: at least one heterodimer comprising: a) a first polypeptide comprising: i) a Wilms tumor-1 (WT-1) peptide epitope, wherein the WT-1 peptide has a length of at least 4 amino acids; and ii) first class I major histocompatibility complex (MHC) polypeptide; b) a second polypeptide comprising a second class I MHC polypeptide, and c) at least one activating immunomodulatory, wherein the first and/or the second polypeptide comprises the immunomodulatory polypeptide, and wherein the WT-1 peptide epitope comprises an amino acid sequence selected from the group consisting of: NLMNLGATL (SEQ ID NO:258), NYMNLGATL (SEQ ID NO:263), CMTWNQMNLGATLKG (SEQ ID NO:223), WNQMNLGATLKGVAA (SEQ ID NO:224), CMTWNYMNLGATLKG (SEQ ID NO:225), WNYMNLGATLKGVAA (SEQ ID NO:226), MTWNQMNLGATLKGV (SEQ ID NO:227). TWNQMNLGATLKGVA (SEQ ID NO:228), CMTWNLMNLGATLKG (SEQ ID NO:229), MTWNLMNLGATLKGV (SEQ ID NO:230), TWNLMNLGATLKGVA (SEQ ID NO:231), WNLMNLGATLKGVAA (SEQ ID NO:232), MNLGATLK (SEQ ID NO:233), MTWNYMNLGATLKGV SEQ ID NO:234), TWNYMNLGATLKGVA (SEQ ID NO:235), CMTWNQMNLGATLKGVA (SEQ ID NO:236), CMTWNLMNLGATLKGVA (SEQ ID NO:237), CMTWNYMNLGATLKGVA (SEQ ID NO:238), GYLRNPTAC (SEQ ID NO:239), GALRNPTAL (SEQ ID NO:240), YALRNPTAC (SEQ ID NO:241), GLLRNPTAC (SEQ ID NO:242), RYRPHPGAL (SEQ ID NO:243). YQRPHPGAL (SEQ ID NO:244), RLRPHPGAL (SEQ ID NO:245), RIRPHPGAL (SEQ ID NO:246), QFPNHSFKHEDPMGQ (SEQ ID NO:247), HSFKHEDPY (SEQ ID NO:248), QFPNHSFKHEDPM (SEQ ID NO:249), QFPNHSFKHEDPY (SEQ ID NO:250), KRPFMCAYPGCNK (SEQ ID NO:251), KRPFMCAYPGCYK (SEQ ID NO:252), FMCAYPGCY (SEQ ID NO:253), FMCAYPGCK (SEQ ID NO:254), KRPFMCAYPGCNKRY (SEQ ID NO:255), SEKRPFMCAYPGCNK (SEQ ID NO:256), KRPFMCAYPGCYKRY (SEQ ID NO:257), NLMNLGATL (SEQ ID NO:258), VLDFAPPGA (SEQ ID NO:259), RMFPNAPYL (SEQ 11) NO:260), CMTWNQMN (SEQ ID NO:261), CYTWNQMNL (SEQ ID NO:269), NYMNLGATL (SEQ ID NO:263), YMFPNAPYL (SEQ ID NO:264), SLGEQQYSV (SEQ ID NO:265), CMTWNQMNL (SEQ ID NO:266), and NQMNLGATL (SEQ ID NO:267), optionally wherein the first or the second polypeptide comprises an immunoglobulin (Ig) Fc polypeptide.

[0758] Aspect 2. A T-cell modulatory multimeric polypeptide of aspect 1, wherein at least one of the one or more immunomodulatory domains is a variant immunomodulatory polypeptide that exhibits reduced affinity to a cognate co-immunomodulatory polypeptide compared to the affinity of a corresponding wild-type immunomodulatory polypeptide for the cognate co-immunomodulatory polypeptide, and wherein the epitope binds to a T-cell receptor (TCR) on a T cell with an affinity of at least 10⁻⁷ M, such that:

[0759] i) the T-cell modulatory multimeric polypeptide binds to a first T cell with an affinity that is at least 25% higher than the affinity with which the T-cell modulatory multimeric polypeptide binds a second T cell, wherein the first T cell expresses on its surface the cognate co-immunomodulatory polypeptide and a TCR that binds the epitope with an affinity of at least 10⁻⁷ M, and wherein the second T cell expresses on its surface the cognate co-immunomodulatory polypeptide but does not express on its surface a TCR that binds the epitope with an affinity of at least 10⁻⁷ M; and/or

[0760] ii) the ratio of the binding affinity of a control T-cell modulatory multimeric polypeptide, wherein the control comprises a wild-type immunomodulatory polypeptide, to a cognate co-immunomodulatory polypeptide to the binding affinity of the T-cell modulatory multimeric polypeptide comprising a variant of the wild-type immunomodulatory polypeptide to the cognate co-immunomodulatory polypeptide, when measured by bio-layer interferometry, is in a range of from 1.5:1 to 10⁶:1.

[0761] Aspect 3. A T-cell modulatory multimeric polypeptide of aspect 2, wherein:

[0762] a) the T-cell modulatory multimeric polypeptide binds to the first T cell with an affinity that is at least 50%, at least 2-fold, at least 5-fold, or at least 10-fold higher than the affinity with which it binds the second T cell; and/or

[0763] b) the variant immunomodulatory polypeptide binds the co-immunomodulatory polypeptide with an affinity of from about 10⁻⁴ M to about 10⁻⁷ M, from about 10⁻⁴ M to about 10⁻¹ M, from about 10⁻⁴ M to about 10⁻⁵ M; and/or

[0764] c) wherein the ratio of the binding affinity of a control T-cell modulatory multimeric polypeptide, wherein the control comprises a wild-type immunomodulatory polypeptide, to a cognate co-immunomodulatory polypeptide to the binding affinity of the T-cell modulatory multimeric polypeptide comprising a variant of the wild-type immunomodulatory polypeptide to the cognate co-immunomodulatory polypeptide, when measured by bio-layer interferometry, is at least 10:1, at least 50:1, at least 10²:1, or at least 10³:1.

[0765] Aspect 4. A T-cell modulatory multimeric polypeptide of any one of aspects 1-3, wherein

[0766] a1) the first polypeptide comprises, in order from N-terminus to C-terminus:
[0767] i) the WT-1 peptide epitope;
[0768] ii) the first MHC polypeptide; and
[0769] iii) at least one immunomodulatory polypeptide; and

[0770] b1) the second polypeptide comprises, in order from N-terminus to C-terminus:
[0771] i) the second MHC polypeptide; and
[0772] ii) an immunoglobulin (Ig) Fe polypeptide; or

[0773] a2) the first polypeptide comprises, in order from N-terminus to C-terminus:
[0774] i) the WT-1 peptide epitope; and
[0775] ii) the first MHC polypeptide; and

[0776] b2) the second polypeptide comprises, in order from N-terminus to C-terminus:
[0777] i) at least one immunomodulatory polypeptide;
[0778] ii) the second MHC polypeptide; and
[0779] iii) an Ig Fc polypeptide; or

[0780] a3) the first polypeptide comprises, in order from N-terminus to C-terminus:
[0781] i) the WT-1 peptide epitope; and
[0782] ii) the first MHC polypeptide; and

[0783] b3) the second polypeptide comprises, in order from N-terminus to C-terminus:
[0784] i) the second MHC polypeptide; and
[0785] ii) an Ig Fe polypeptide; and
[0786] iii) at least one immunomodulatory polypeptide; or

[0787] a4) the first polypeptide comprises, in order from N-terminus to C-terminus:
[0788] i) the WT-1 peptide epitope; and
[0789] ii) the first MHC polypeptide; and

[0790] b4) the second polypeptide comprises, in order from N-terminus to C-terminus:
[0791] i) the second MHC polypeptide; and
[0792] ii) at least one immunomodulatory polypeptide; or

[0793] a5) the first polypeptide comprises, in order from N-terminus to C-terminus:
[0794] i) the WT-1 peptide epitope; and
[0795] ii) the first MHC polypeptide; and

[0796] b5) a second polypeptide comprises, in order from N-terminus to C-terminus:
[0797] i) at least one immunomodulatory polypeptide; and
[0798] ii) the second MHC polypeptide; or

[0799] a6) the first polypeptide comprises, in order from N-terminus to C-terminus:
[0800] i) the WT-1 peptide epitope;
[0801] ii) the first MHC polypeptide; and
[0802] iii) at least one immunomodulatory polypeptide; and

[0803] b6) the second polypeptide comprises:
[0804] i) the second MHC polypeptide.

[0805] Aspect 5. A T-cell modulatory multimeric polypeptide of any one of aspects 1-4, wherein:

[0806] a) the first MHC polypeptide is a β2-microglobulin polypeptide; and the second MHC polypeptide is an MHC class I heavy chain polypeptide; or

[0807] b) the first MHC polypeptide is an MHC class I heavy chain polypeptide; and the second MHC polypeptide is a β2-microglobulin polypeptide.

[0808] Aspect 6. A T-cell modulatory multimeric polypeptide of aspect 5, wherein:
[0809] a) the first polypeptide comprises, in order from N-terminus to C-terminus:
[0810] i) the WT-1 peptide epitope; and
[0811] ii) the β2-microglobulin polypeptide; and

[0812] b) the second polypeptide comprises, in order from N-terminus to C-terminus:
[0813] i) at least one immunomodulatory polypeptide;
[0814] ii) the MHC class I heavy chain polypeptide; and
[0815] iii) an Ig Fc polypeptide.

[0816] Aspect 7. A T-cell modulatory multimeric polypeptide of aspect 5, wherein:
[0817] a) the first polypeptide comprises, in order from N-terminus to C-terminus:
   [0818] i) the WT-1 peptide epitope; and
   [0819] ii) the β2-microglobulin polypeptide; and
[0820] b) the second polypeptide comprises, in order from N-terminus to C-terminus:
[0821] i) the MHC class I heavy chain polypeptide; and
[0822] ii) an Ig Fc polypeptide; and
   [0823] iii) at least one immunomodulatory polypeptide

[0824] Aspect 8. A T-cell modulatory multimeric polypeptide of any one of aspects 1-7, wherein the at least one immunomodulatory polypeptide is selected from the group consisting of a cytokine, a 4-1BBL polypeptide, an ICOS-L polypeptide, an OX-40L polypeptide, a CD80 polypeptide, a CD86 polypeptide, a CD40 polypeptide, a CD70 polypeptide, and combinations thereof.

[0825] Aspect 9. A T-cell modulatory multimeric polypeptide of any one of aspects 1-8, wherein the at least one immunomodulatory polypeptide is an IL-2 polypeptide.

[0826] Aspect 10. A T-cell modulatory multimeric polypeptide of any one of aspects 1-9, wherein the multimeric polypeptide comprises at least two immunomodulatory polypeptides, and wherein at least two of the immunomodulatory polypeptides are the same, optionally wherein the 2 or more immunomodulatory polypeptides are in tandem.

[0827] Aspect 11. A T-cell modulatory multimeric polypeptide of any one of aspects 1-10, wherein the immunomodulatory polypeptide is a variant IL-2 polypeptide that exhibits reduced affinity to an IL-2 receptor compared to the affinity of a wild-type IL-2 polypeptide for the IL-2 receptor.

[0828] Aspect 12. A T-cell modulatory multimeric polypeptide of aspect 11, wherein the variant IL-2 polypeptide comprises: i) an H16A substitution and an F42A substitution; or ii) an H16T substitution and an F42A substitution.

[0829] Aspect 13. A T-cell modulatory multimeric polypeptide of any one of aspects 1-12, wherein the first polypeptide and the second polypeptide are covalently linked to one another, optionally wherein the covalent linkage is via a disulfide bond.

[0830] Aspect 14. A T-cell modulatory multimeric polypeptide of any one of aspects 1-13, wherein the first MHC polypeptide or a linker between the epitope and the first MHC polypeptide comprises an amino acid substitution to provide a first Cys residue, wherein the second MHC polypeptide comprises an amino acid substitution to provide a second Cys residue, and wherein the disulfide linkage is between the first and the second Cys residues.

[0831] Aspect 15. The T-cell modulatory multimeric polypeptide of any one of aspects 1-14, wherein the polypeptide comprises a disulfide bond between: i) a Cys present in a linker between the WT-1 peptide epitope and the first MHC class I polypeptide, wherein the first MHC class I polypeptide is a B2M polypeptide; and ii) a Cys residue introduced via a Y84C substitution in the second MHC class I polypeptide, wherein the second MHC class I polypeptide is a MHC Class I heavy chain polypeptide.

[0832] Aspect 16. The T-cell modulatory multimeric polypeptide of any one of aspects 1-14, wherein the polypeptide comprises a disulfide bond between i) a Cys residue introduced into the first MHC class I polypeptide via an R12C substitution, wherein the first MHC class I polypeptide is a β2M polypeptide; and ii) a Cys residue introduced into the second MHC class I polypeptide, via an A236C substitution, wherein second MHC class I polypeptide is an MHC Class I heavy chain polypeptide.

[0833] Aspect 17. The T-cell modulatory multimeric polypeptide of any one of aspects 1-14, wherein the polypeptide comprises a first disulfide bond between: i) a Cys present in a linker between the WT-1 peptide epitope and the first MHC class I polypeptide, wherein the first MHC class I polypeptide is a β2M polypeptide; and ii) a Cys residue introduced via a Y84C substitution in the second MHC class I polypeptide, wherein the second MHC class I polypeptide is a MHC Class I heavy chain polypeptide, and a second disulfide bond between i) a Cys residue introduced into the 12M polypeptide via an R12C substitution; and ii) a Cys residue introduced into the MHC Class I heavy chain polypeptide via an A236C substitution.

[0834] Aspect 18. A T-cell modulatory multimeric polypeptide of aspect 15 or aspect 17, wherein the linker between the WT-1 peptide epitope and the first MHC is GCGGS(G4S)n (SEQ ID NO:315), where n is 1, 2, 3, 4, 5, 6, 7, 8, or 9.

[0835] Aspect 19. A T-cell modulatory multimeric polypeptide of any one of aspects 1-18, wherein the WT-1 peptide epitope has a length of from about 4 amino acids to about 25 amino acids.

[0836] Aspect 20. A T-cell modulatory multimeric polypeptide of any one of aspects 1-19, wherein the WT-1 peptide comprises the amino acid sequence CMTWNQMNL (SEQ ID NO: 266), CYTWNQMNL (SEQ ID NO:269), NYMNLGATL (SEQ ID NO:263), VLDFAPPGA (SEQ ID NO:259), YMFPNAPYL (SEQ ID NO:264), SLGEQQYSV (SEQ ID NO:265), RMFPNAPYL (SEQ ID NO:260), and NLMNLGATL (SEQ ID NO:258).

[0837] Aspect 21. A T-cell modulatory multimeric polypeptide of any one of aspects 1-20, wherein the first or the second MHC polypeptide comprises:

[0838] a) an amino acid sequence having at least 95% amino acid sequence identity to the HLA-A*0101, HLA-A*0201, HLA-A*0201, HLA-A*1101, HLA-A*2301, HLA-A*2402, HLA-A*2407.

HLA-A*3303, or HLA-A*3401 amino acid sequence depicted in FIG. 9A; or

[0839] b) an amino acid sequence having at least 95% amino acid sequence identity to the HLA-B*0702, HLA-B*0801, HLA-B*1502, HLA-B*3802, HLA-B*4001, HLA-B*4601, or HLA-B*5301 amino acid sequence depicted in FIG. 10A; or

[0840] c) an amino acid sequence having at least 95% amino acid sequence identity to the HLA-C*0102, HLA-C*0303, HLA-C*0304, HLA-C*0401, HLA-C*0602, HLA-C*0701. HLA-C*0702, HLA-C*0801, or HLA-C*1502 depicted in FIG. 11A.

[0841] Aspect 22. A T-cell modulatory multimeric polypeptide of any one of aspects 1-21, wherein the first MHC polypeptide is a β2M polypeptide, and wherein the second MHC polypeptide comprises an amino acid sequence having at least 95% amino acid sequence identity to an HLA-A*2402 polypeptide, and wherein the epitope is selected from the group consisting of: RMFPNAPYL (SEQ ID NO:260), CYTWNQMNL (SEQ ID NO:269), and NYMNLGATL (SEQ ID NO:263).

[0842] Aspect 23. A T-cell modulatory multimeric polypeptide of any one of aspects 1-21, wherein the first MHC polypeptide is a β2M polypeptide, and wherein the second MHC polypeptide comprises an amino acid sequence having at least 95% amino acid sequence identity to an HLA-A*0201 polypeptide, and wherein the epitope is selected from the group consisting of: VLDFAPPGA (SEQ ID NO:259), RMFPNAPYL (SEQ ID NO:260), and YMFPNAPYL (SEQ ID NO:264).

[0843] Aspect 24. A T-cell modulatory multimeric polypeptide of any one of aspects 1-23, wherein the multimeric polypeptide comprises a first and a second heterodimer, and wherein the first and second heterodimers are covalently bound by one or more disulfide bonds between the Ig Fc polypeptides of the first and second heterodimers.

[0844] Aspect 25. A nucleic acid comprising a nucleotide sequence encoding a first or second polypeptide according to any one of aspects 1-24.

[0845] Aspect 26. An expression vector comprising the nucleic acid of aspect 25.

[0846] Aspect 27. A method of selectively modulating the activity of T cell specific for a Wilms tumor-1 (WT-1) epitope, the method comprising contacting the T cell with a T-cell modulatory multimeric polypeptide according to any one of aspects 1-24, wherein said contacting selectively modulates the activity of the WT-1 epitope-specific T cell.

[0847] Aspect 28. A method of treating a patient having a cancer, the method comprising administering to the patient an effective amount of a pharmaceutical composition comprising T-cell modulatory multimeric polypeptide according to any one of aspects 1-24.

[0848] Aspect 29. The method of aspect 28, wherein the cancer is acute myeloid leukemia, myeloma, ovarian cancer, pancreatic cancer, non-small cell lung cancer, colorectal cancer, breast cancer, Wilms tumor, mesothelioma, soft tissue sarcoma, neuroblastoma, or nephroblastoma.

[0849] Aspect 30. A method of aspect 28 or aspect 29, further comprising administering one or more checkpoint inhibitors to the individual.

[0850] Aspect 31. A method according to aspect 30, wherein the checkpoint inhibitor is an antibody that binds to a polypeptide selected from the group consisting of CD27, CD28, CD40, CD122, CD96, CD73, CD47, OX40, GITR, CSF1R, JAK, PI3K delta, PI3K gamma, TAM, arginase, CD137, ICOS, A2AR, B7-H3, B7-H4, BTLA, CTLA-4, LAG3, TIM3, VISTA, CD96, TIGIT, CD122, PD-1, PD-L1, and PD-L2.

[0851] Aspect 32. A method according to aspect 31, wherein the checkpoint inhibitor is an antibody specific for PD-1, PD-L1, or CTLA4.

[0852] Aspect 33. A method according to aspect 30, wherein the one or more checkpoint inhibitors is selected from the group consisting of nivolumab, pembrolizumab, pidilizumab, AMP-224, MPDL3280A, MDX-1105, MEDI-4736, arelumab, ipilimumab, tremelimumab, pidilizumab, IMP321, MGA271, BMS-986016, lirilumab, urelumab, PF-05082566, IPH2101, MEDI-6469, CP-870,893, Mogamulizumab, Varlilumab, Avelumab, Galiximab, AMP-514, AUNP 12, Indoximod, NLG-919, INCB024360, KN035, and combinations thereof.

[0853] Aspect 34. A method of modulating an immune response in an individual, the method comprising administering to the individual an effective amount of the T-cell modulatory multimeric polypeptide of any one of aspects 1-24, wherein said administering induces an epitope-specific T cell response and an epitope-non-specific T cell response, and wherein the ratio of the epitope-specific T cell response to the epitope-non-specific T cell response is at least 2:1.

[0854] Aspect 35. A method of delivering an immunomodulatory polypeptide selectively to a target T cell, the method comprising contacting a mixed population of T cells with a T-cell modulatory multimeric polypeptide of any one of aspects 1-24, wherein the mixed population of T cells comprises the target T cell and non-target T cells, wherein the target T cell is specific for the WT-1 epitope present within the T-cell modulatory multimeric polypeptide, and wherein said contacting delivers the one or more immunomodulatory polypeptides present within the T-cell modulatory multimeric polypeptide to the target T cell.

[0855] Aspect 36. A method of detecting, in a mixed population of T cells obtained from an individual, the presence of a target T cell that binds a WT-1 epitope, the method comprising: a) contacting in vitro the mixed population of T cells with the T-cell modulatory multimeric polypeptide of any one of aspects 1-24, wherein the T-cell modulatory multimeric polypeptide comprises the WT-1 epitope; and b) detecting activation and/or proliferation of T cells in response to said contacting, wherein activated and/or proliferated T cells indicates the presence of the target T cell.

### EXAMPLES

[0856] The following examples are put forth so as to provide those of ordinary skill in the art with a complete disclosure and description of how to make and use the present invention, and are not intended to limit the scope of what the inventors regard as their invention nor are they intended to represent that the experiments below are all or the only experiments performed. Efforts have been made to ensure accuracy with respect to numbers used (e.g. amounts, temperature, etc.) but some experimental errors and deviations should be accounted for. Unless indicated otherwise, parts are parts by weight, molecular weight is weight average molecular weight, temperature is in degrees Celsius, and pressure is at or near atmospheric. Standard abbreviations may be used, e.g., bp, base pair(s); kb, kilobase(s); pl, picoliter(s); s or see, second(s); min, minute(s); h or hr, hour(s); aa, amino acid(s); kb, kilobase(s); bp, base pair(s); nt, nucleotide(s); i.m., intramuscular(ly); i.p., intraperitoneal(ly); s.c., subcutaneous(ly); and the like.

### Example 1

[0857] The effect of linking the two polypeptide chains of a TMMP heterodimer via two disulfide bonds on stability and production was tested.

[0858] The following TMMPs were generated: a) a TMMP comprising 1715+2380 polypeptides; and b) a TMMP comprising 1715 and 2381 polypeptides. The amino acid sequences of the polypeptide chains are provided in FIG. 14A-14C. As shown in FIG. 15 and FIG. 16, the TMMPs included: i) Class I HLA-A heavy chain polypeptides of the A02:01 allele; and ii) two copies of IL2 (H16A; F42A) immunomodulatory (“MOD”) polypeptides. The 2380 polypeptide comprises the WT1 peptide WT1(37-45), while the 2381 polypeptide comprises the WT1 peptide WT1 (126-134). The 1715-2380 TMMP is a homodimer of a heterodimer comprising the 1715 polypeptide and the 2380 polypeptide. Likewise, the 1715-2381 TMMP is a homodimer of a heterodimer comprising the 1715 polypeptide and the 2381 polypeptide. Thus, the TMMPs included: i) 2 copies of the 1715+2380 heterodimer, linked by 2 disulfide bonds between the IgFc polypeptide present in the 1715 polypeptides; or ii) 2 copies of the 1715+2381 heterodimer, linked by 2 disulfide bonds between the IgFc polypeptide present in the 1715 polypeptides. This arrangement is depicted schematically in FIG. 17C.

[0859] TMMP 1715+2380 is a double disulfide-linked heterodimer: a) a first disulfide linkage is between: i) the Cys present in the linker between the WT1 peptide and the β2M chain in the 2380 polypeptide; and ii) the Cys introduced by the Y84C substitution in the Class I heavy chain present in the 1715 polypeptide; and b) a second disulfide linkages is between: i) the Cys introduced by the R12C substitution in the β2M polypeptide present in the 2380 polypeptide; and ii) the Cys introduced by the A236C substitution in the Class I heavy chain present in the 1715 polypeptide.

[0860] TMMP 1715+2381 is a double disulfide-linked heterodimer: a) a first disulfide linkage is between: i) the Cys present in the linker between the WT1 peptide and the β2M chain in the 2381 polypeptide; and ii) the Cys introduced by the Y84C substitution in the Class I heavy chain present in the 1715 polypeptide; and b) a second disulfide linkages is between: i) the Cys introduced by the R12C substitution in the β2M polypeptide present in the 2381 polypeptide; and ii) the Cys introduced by the A236C substitution in the Class I heavy chain present in the 1715 polypeptide.

[0861] The TMMPs were produced in ExpiCHO cells (adapted from Chinese hamster ovary (CHO) cells; ThermoFisher; see, e.g., Jain et al. (2017) Protein Expr. Purif. 134:38) and were purified from the cell culture medium in which the cells were grown. Two purification steps were carried out. In a first step, the cell culture medium was clarified, and the clarified cell culture medium was subjected to Protein A column purification. In the second purification step, the eluate from the Protein A column was subjected to size exclusion chromatography.

[0862] The stability of the purified TMMPs was tested. The amount of heterodimeric TMMP present was determined after storage of the purified TMMPs in a liquid solution (phosphate-buffered saline (PBS) containing 365 mM NaCl, pH 7.4) for 28 days at 37° C. or for 28 days at 42° C.

[0863] In addition, the purified TMMPs were subjected to 3 freeze/thaw cycles.

[0864] The results are depicted in FIG. 15 and FIG. 16.

[0865] As shown in FIG. 15, a homodimer of the 1715-2380 heterodimer (referred to in FIG. 15 as “monomer”) represented 80% of the eluate from the Protein A column. As shown in FIG. 16, a homodimer of the 1715-2381 heterodimer (referred to in FIG. 16 as “monomer”) represented 79% of the eluate from the Protein A column.

[0866] Homodimers of heterodimers 1715-2380 and 1715-2381 were found to be stable to 3 freeze/thaw cycles.

[0867] Unfolding temperatures of the peptide/HLA, IL-2, and Fe domains of various TMMPs, expressed as Tₘ (° C.), are provided in FIG. 15 and FIG. 16. In addition, the temperature at which aggregation occurs (Tₘ° C.) is provided in FIG. 15 and FIG. 16.

### Example 2

[0868] Biochemical characterization of TMMPs comprising WT1 epitopes, HLA-A*02 heavy chains, either one or two disulfide bonds between the 2 polypeptide chains of the heterodimer, and variant IL-2 immunomodulatory polypeptides at position 1

[0869] The constructs used in this study are summarized in Table 2.

TABLE 2

| Constructs | Epitope | S—S bond(s) | IL-2 position |
|---|---|---|---|
| 2405 + 2762 | WT-1 (37-45) | G2C | 1 |
| 1715 + 2380 | WT-1 (37-45) | G2C + R12C | 1 |
| 2405 + 2763 | WT-1 (126-134) | G2C | 1 |
| 1715 + 2381 | WT-1 (126-134) | G2C + R12C | 1 |
| 2405 + 3626 | WT-1 (126-134 | G2C | 1 |
| | (R126Y)) | | |
| 1715 + 3625 | WT-1 (126-134 | G2C + R12C | 1 |
| | (R126Y)) | | |

[0870] Amino acid sequences of the polypeptide chains of the constructs are provided in FIG. 14A-141.

[0871] “G2C” indicates that the TMMP includes a disulfide bond between: i) a Cys in the peptide linker between the peptide epitope and the β2M polypeptide; and ii) a Cys at position 84 of the MHC class I heavy chain, where the MHC class I heavy chain has a Y84C substitution.

[0872] “R12C” indicates that the TMMP includes a disulfide bond between: i) a Cys at position 12 in the β2M polypeptide, where the $2M polypeptide has an R12C substitution; and ii) a Cys at position 236 of the MHC class I heavy chain, where the MHC class I heavy chain has an A236C substitution.

[0873] “G2C+R12C” indicates that the TMMP includes both the “G2C” disulfide bond and the “R12C” disulfide bond.

[0874] WT-1 (37-45) is VLDFAPPGA (SEQ ID NO:259).

[0875] WT-1 (126-134) is RMFPNAPYL (SEQ ID NO:260).

[0876] WT-1 (126-134 (R126Y)) is YMFPNAPYL (SEQ ID NO:264) and is also referred to as “126-134 mimotope.”

[0877] IL-2 “position 1” is depicted schematically in FIG. 19.

### Results

[0878] The ability of TMMPs to stimulate antigen-specific proliferation of CD8⁺ T cells was tested. The TMMPs included, as the epitope: i) WT1 37-45; ii) WT1 126-134; or iii) WT1 126-134 (R126Y). All TMMPs included A02 allele MHC class I heavy chains.

[0879] Peripheral blood mononuclear cells (PBMCs) obtained from human donors were incubated in vitro with the TMMPs at various concentrations (0 nM, 10 nM, 100 nM, 300 nM, or 1000 nM) for 10 days. After the 10-day incubation period, the number of cells specific for the epitope was determined. Data from PBMCs from two donors (“Leukopak 7 and Leukopak 12”) are shown in FIG. 21.

[0880] The data presented in FIG. 21 demonstrate, in two donors, that WT1-specific TMMPs can induce expansion of WT1-specific CD8+ T cells from total PBMCs over a course of a 10-day stimulation culture. This expansion was achieved in PBMCs that have low or no detectable WT1-specific T cell precursors, indicating that the TMMPs were able to induce antigen-specific responses in donors from an unprimed or naïve repertoire. The data demonstrate that TMMPs specific for any of the 3 selected WT1 peptides (37-45, 126-134, and 126-134 R126Y) and on either of the two tested disulfide frameworks (G2C and R12C/G2C) induce expansion of WT1-specific CD8+ T cells from total PBMCs.

[0881] PBMCs from different human donors (L7, L10, and L12) were stimulated for 10 days in vitro with the indicated WT1 peptides in the presence of recombinant human IL-2 and then re-stimulated for 8 days with TMMPs, containing the same peptides, and containing either the G2C disulfide bond or both the R12C and G2C disulfide bonds. The data are depicted in FIG. 22.

[0882] The data presented in FIG. 22 demonstrate, in PBMCs from three donors, that WT1-containing TMMPs can expand WT1-specific CD8+ T cells from total PBMCs over a course of an 8-day re-stimulation culture following a 10-day priming culture. This expansion occurred from cells that have a detectable number of WT1-specific T cell precursors, indicating that the TMMPs were able to expand antigen-specific T cells in donors with a primed/preexisting WT-1 specific T cell repertoire. The data demonstrate that TMMPs specific for any of the 3 WT1 peptides (37-45, 126-134, and 126-134 R126Y) and on either of the two tested disulfide frameworks (G2C and R12C/G2C) induce such expansions.

[0883] The ability of the CD8′ T cells expanded by contacting with TMMPs containing the WT1 37-45 peptide and containing either the G2C disulfide bond or both the R12C and G2C disulfide bonds, to produce TNF-α and IFN-γ in response to target cells (T2 cells) presenting the WT1-37-45 peptide or an irrelevant peptide (SL9) was tested. Phorbol 12-myristate 13-acetate (PMA) and ionomycin (“iono”) were used as a positive control. CD8⁺ T cells treated with media were used as a negative control. CD8⁺ T cells expanded by TMMPs were incubated with ‘target cells’ (T2 cells) that were loaded with either a WT1 peptide or with an irrelevant peptide (the SL9 peptide from HIV). The response, as indicated by production of IFN-γ and TNF-α, of the CD8+ T cells to the T2 cells pulsed with WT 37-45 peptide was compared to the response to T2 cells pulsed with SL9 peptide. The data are shown in FIG. 23.

[0884] The data presented in FIG. 23 demonstrate the selective polyfunctionality of the WT1 37-45-specific CD8+ T cells expanded with WT1 37-45 containing TMMPs having either the G2C or R12C/G2C framework. The response measured (TNF-α and IFN-γ production) was observed only upon recognition of target cells presenting the WT1 37-45 peptide but not the SL9 peptide. The positive and negative control wells show that there is no baseline activity in the CD8+ T cells in the absence of stimulation (as seen in the media-only wells) and that both antigen-specific and non-antigen-specific cells are capable of showing functional responses upon strong, antigen-non-specific stimulation (PMA+ionomycin).

[0885] Using the same assay, the ability of the CD8 T cells expanded by TMMPs containing the WT1 126-134 peptide (“WT1 126”) and containing the R12C and G2C disulfide bonds, to produce TNF-α and IFN-γ in response to target cells (T2 cells) presenting the WT1-126-134 peptide, WT1-126-134 R126Y peptide or an irrelevant peptide (SL9) was tested. The data are shown in FIG. 24.

[0886] The data presented in FIG. 24 demonstrate the selective polyfunctionality of the WT1 126-134-specific CD8+ T cells expanded with WT1 126-134 specific Immuno-STATs on the R12C/G2C framework. The response measured (TNF-α and IFN-γ production) was observed only upon recognition of target cells presenting the WT1 126-134 peptide or the WT1 126-134 R126Y peptide but not the SL9 peptide. The positive and negative control wells show that there is no baseline activity in the CD8+ T cells in the absence of stimulation (as seen in the media-only wells) and that both antigen-specific and non-antigen-specific cells are capable of showing functional responses upon strong, antigen-non-specific stimulation (PMA+ionomycin).

[0887] The effect of disulfide bonds on IL-2-driven immune cell activation was tested. CD69 is an early activation marker on most lymphocytes and some other immune cells. Cells upregulate CD69 upon different types of stimulatory conditions, including IL-2 stimulation. CD69 upregulation on both NK cells, CD4⁺ T cells, and CD8⁺ T cells was assessed. CD69 upregulation demonstrates that the IL-2 polypeptides present in the TMMPs are active and that their function is attenuated compared to control (recombinant human IL-2). PBMCs from different human donors were incubated with various TMMPs (“ISTs”) set out in the table. TMMPs comprising a CMV epitope or a MART-1 epitope were included as controls. Data from one human donor (Leukopak 6) are shown. The data are shown in FIG. 25. FIG. 25 shows the upregulation of CD69 on NK cells as a relevant and representative example of a cell that readily upregulates CD69 in response to IL-2. Similar data was observed on CD8+ T cell gates and CD4+ T cell gates.

[0888] The data presented in FIG. 25 demonstrates the IL-2 immunomodulatory polypeptide engineered on position 1 into HLA-A02-specific Immuno-STATs built on various disulfide frameworks (R12C, G2C and R12C/G2C) is functional (as observed by the induction of CD69 on the surface of a relevant immune cell) and attenuated compared to wild-type recombinant human IL-2.

[0889] To evaluate the potency of the variant IL-2 immunomodulatory polypeptides present in the TMMPs, a CTLL-2 proliferation assay was carried out. CTLL-2 cells are dependent on IL-2 for growth; thus, CTLL-2 proliferation is a measure of the amount and/or potency of IL-2 present in the culture medium (e.g., where the IL-2 is produced by T cells contacted with a TMMP). Gillis et al. (1978) J. Immunol. 120:2027.

[0890] The data are shown in FIG. 26. The data presented in FIG. 26 demonstrate that the IL-2 immunomodulatory polypeptide engineered on position 1 into HLA-A02-specific Immuno-STATs (TMMPs) built on various disulfide frameworks (R12C, G2C and R12C/G2C) is functional (as observed by the induction of CTLL-2 proliferation) and attenuated compared to proleukin.

[0891] The ability of the TMMPs used in these experiments to bind to FcRn was tested. The TMMPs include an Ig Fc region that can bind to FcRn. Binding to FcRn is an indication of prolonged in vivo half-life. Souders et al. (2015) MAbs 7:912. The data for the “1715+2380” TMPP are shown in FIG. 27.

[0892] The ability of the “1715+2380” TMPP to bind to other Fe receptors was tested. The “1715+2380” TMPP includes an Ig Fc region with LALA substitutions, which reduce binding of the Ig Fe to FcRI, RIIA, IIB, IIIA-F, and IIIB, thereby reducing Ig Fc-mediated effector functions. The data are shown in FIG. 27.

### Materials and Methods

### FIG. 21

[0893] Leukopaks from two healthy donors were obtained using apheresis machines. Leukopaks were diluted with an equal volume of room temperature phosphate-buffered saline (PBS). PBMCs were isolated from diluted leukopaks by density gradient centrifugation as follows: 30 mL of diluted leukopak was underlayed with 13 mL of Ficoll-Paque in a 50 mL conical tube and centrifugated at 400 g for 30 minutes at room temperature in a swinging bucket rotor without brake. Mononuclear cell layer (lymphocytes, monocytes and thrombocytes) was collected from the plasma-Ficoll interface, transferred to new 50 mL conical tube and washed with 3-fold excess PBS by centrifugation at 300 g for 10 minutes at room temperature. After careful removal of supernatant, cells were resuspended and washed with 50 mL of PBS by centrifugation at 200 g for 10 minutes at room temperature to remove platelets. Upon washing and platelet removal, obtained PBMCs were pooled from the 50 mL tubes, resuspended in PBS, counted, pelleted by centrifugation at 300 g for 10 minutes and resuspended at a final concentration of 50×10⁺ cells per ml in cell freezing media.

[0894] Human healthy donor PBMCs were prepared from two leukopaks as described above. On the day of the experiment, the cells were thawed in A 37° C. water bath and washed in warm ImmunoCult™-XF Cell Expansion Media (Stemcell Technologies) by centrifugation at 350×g for 6 minutes. The supernatant was removed, and the cells were resuspended in ImmunoCult™ media. Live cell count was assessed using the Countess automated cell counter (Invitrogen, CA). The media volume was adjusted to bring the cell concentration to 5×10⁶ cells/ml and 2 mL of cells (equivalent to 10×10⁶ cells) were seeded per well in a 6-well plate. PBMCs were stimulated with the indicated amounts of Immuno-STATs or with media alone in a total volume of 4 ml of media. Cells were stimulated for 10 days at 37° C., 5% CO₂ with media replacement on days 5 and 7 by aspirating 2 mL of culture supernatant from the wells and adding back 2 mL of fresh media.

[0895] Upon culture, the cells were harvested and pelleted by centrifugation at 350×g for 5 minutes, live cell counts were determined by the Countess automated cell counter (Invitrogen, CA), and cells were processed for flow cytometry by staining with: a viability stain, appropriate WT1-peptide-specific HLA-A*0201 tetramers (MBL International) and antibodies against CD69, CD3, CD14, CD19, CD127, CD56, CD4 (Biolegend), CD8, CD25 (BD Biosciences) Stained cells were washed and analyzed by flow cytometry.

[0896] Data acquisition was performed using the Attune NxT flow cytometer instrument (Invitrogen). The acquired data was exported as fcs files and analyzed using the Flowjo software (Tree Star, OR).

[0897] Based on the frequency of antigen-specific T cells, volumes and events analyzed by flow cytometry and total volume and number of cells harvested at the end of the culture, the number of antigen specific T cells per well was calculated and plotted in the graphs shown.

### FIG. 22

[0898] PBMCs from two donors were expanded for 10 days with 10 micrograms/ml of the indicated peptides and 50 U/ml of recombinant human IL-2. Expansion was done in 6-well plates with a total of 10 million cells in 4 ml of Immunocult media per well. Cells were stimulated for 10 days at 37° C., 5% CO₂ with media replacement on days 5 and 7 by aspirating 2 mL of culture supernatant from the wells and adding back 2 mL of fresh media with 50 U/ml of recombinant human IL-2. Upon culture, the cells were harvested and pelleted by centrifugation at 350 g for 5 minutes, live cell counts were determined by the Countess automated cell counter (Invitrogen, CA). Each stimulation condition was performed in at least 3 wells of a six well plate. PBMCs from one well were used to estimate the frequency/amount of WT1-specific CD8+ T cells in the culture by flow cytometry upon staining with: a viability stain, appropriate WT1-peptide-specific HLA-A*0201 tetramers (MBL International) and antibodies against CD69, CD3, CD14, CD19, CD127, CD56, CD4 (Biolegend), CD8, CD25 (BD Biosciences). Stained cells were washed and analyzed by flow cytometry. At least two wells were used to enrich for CD8+ T cells using a CD8+ T cell negative selection kit from Stem Cell Technologies. The purified CD8+ T cells were restimulated for 8 days with the indicated TMMPs in the presence of autologous PBMCs, previously treated with mitomycin C, in a 1:2 ratio, with a final 5-10 million cells in a volume of 4 ml of Immunocult media per well. TMMPs were used at concentrations previously established to be optimal for the combination of a donor and a particular TMMP.

[0899] Upon culture, the cells were harvested and pelleted by centrifugation at 350 g for 5 minutes, live cell counts were determined by the Countess automated cell counter (Invitrogen, CA) and processed for flow cytometry by staining with: a viability stain, appropriate WT1-peptide-specific HLA-A*0201 tetramers (MBL International) and antibodies against CD69, CD3, CD14, CD19, CD127, CD56, CD4 (Biolegend), CD8. CD25 (BD Biosciences) Stained cells were washed and analyzed by flow cytometry.

[0900] Data acquisition was performed using the Attune NxT flow cytometer instrument (Invitrogen). The acquired data was exported as fcs files and analyzed using the Flowjo software (Tree Star, OR).

[0901] Based on the frequency of antigen-specific T cells, volumes and events analyzed by flow cytometry and total volume and number of cells harvested at the end of the culture, the number of antigen specific T cells per well was calculated and plotted in the graphs shown.

### FIG. 23

[0902] PBMCs from two donors were expanded for 10 days with 10 micrograms/ml of the WT1 37-45 peptide and 50 U/ml of recombinant human IL-2. Expansion was done in 6-well plates with a total of 10 million cells in 4 ml of Immunocult media per well. Cells were stimulated for 10 days at 37° C., 5% CO₂ with media replacement on days 5 and 7 by aspirating 2 mL of culture supernatant from the wells and adding back 2 mL of fresh media with 50 U/ml of recombinant human IL-2. Upon culture, the cells were harvested and pelleted by centrifugation at 350 g for 5 minutes, live cell counts were determined by the Countess automated cell counter (Invitrogen, CA). The stimulation was performed in at least 3 wells of a six well plate. PBMCs from one well were used to estimate the frequency/amount of WT1 37-45 peptide-specific CD8+ T cells in the culture by flow cytometry upon staining with: a viability stain, appropriate WT1 37-45-peptide-specific HLA-A*0201 tetramers (MBL International) and antibodies against CD69, CD3, CD14, CD19, CD127, CD56, CD4 (Biolegend), CD8, CD25 (BD Biosciences). Stained cells were washed and analyzed by flow cytometry. Data acquisition was performed using the Attune NxT flow cytometer instrument (Invitrogen). The acquired data was exported as fcs files and analyzed using the Flowjo software (Tree Star, OR).

[0903] At least two wells were used to enrich for CD8+ T cells using a CD8+ T cell negative selection kit from Stem Cell Technologies. The purified CD8+ T cells were restimulated for 8 days with the indicated WT1 37-45 specific Immuno-STATs on either the G2C or the R12C/G2C framework in the presence of autologous PBMCs, previously treated with mitomycin C, in a 1:2 ratio, with a final 5-10 million cells in a volume of 4 ml of Immunocult media per well. WT1 37-45 specific Immuno-STAT on either the G2C or the R12C/G2C framework was used at the concentration previously established to be optimal for that donor.

[0904] Upon culture, the cells were harvested and pelleted by centrifugation at 350 g for 5 minutes, live cell counts were determined by the Countess automated cell counter (Invitrogen, CA) and CD8+ T cells were enriched using a CD8+ T cell negative selection kit from Stem Cell Technologies.

[0905] Target cells, T2 cells (ATCC), were pulsed with 5 μg/ml, of the WT1 37-45 peptide or the human immunodeficiency virus-1 (HIV-1) Gag₇₇₋₈₅ SL9 peptide for 2 hours at 37° C., 5% CO₂. Post-peptide loading, the T2 cells were washed twice and resuspend in ImmunoCult™-XF Cell Expansion Media (Stemcell Technologies).

[0906] The enriched CD8+ T cells and the peptide-loaded T2 cells were mixed at a 1:1 ratio (1×10⁶ cells each) in a final volume of 200 μL per well in 96-well plates. Media and Phorbol 12-myristate; 13-acetate (PMA)/ionomycin was added to control wells as negative and positive controls, respectively. At 0.5 to 1 hour post-stimulation, the staining antibody against CD107a was added directly to the cells. Cell were stimulated for 5 hours, washed with PBS and stained for viability using the FVS780 for 10 minutes on ice. The cells were washed stained with the WT1 37-45 peptide-specific tetramers (labeled with APC and PE) for 15 minutes at room temperature. Subsequently, the cells were washed and stained antibodies against CD3 and CD8 for 30 minutes on ice. Stained cells were washed twice and resuspended in intracellular (IC) fixation buffer overnight at 4° C. The following day, the cells were washed and resuspended in permeabilization buffer and incubated for 5 minutes at room temperature. Permeabilized cells were washed and stained with antibodies against interferon-γ (IFN-γ), tumor-necrosis factor-α (TNF-α), resuspended in permeabilization buffer, for 30 minutes at room temperature. Stained cells were washed, resuspended in 2 mL of FACS buffer, and transferred to a 96-well deep plate. Data acquisition was performed using the Attune NxT flow cytometer instrument (Thermofisher Scientific, MA). The acquired data was exported as fcs files and analyzed using the Flowjo software (Tree Star, OR).

### FIG. 24

[0907] PBMCs from two donors were expanded for 10 days with 10 micrograms/ml of the WT1 126-134 peptide and 50 U/ml of recombinant human IL-2. Expansion was done in 6-well plates with a total of 10 million cells in 4 ml of Immunocult media per well. Cells were stimulated for 10 days at 37° C., 5% CO₂ with media replacement on days 5 and 7 by aspirating 2 mL of culture supernatant from the wells and adding back 2 mL of fresh media with 50 U/ml of recombinant human IL-2. Upon culture, the cells were harvested and pelleted by centrifugation at 350 g for 5 minutes, live cell counts were determined by the Countess automated cell counter (Invitrogen, CA). The stimulation was performed in at least 3 wells of a six well plate. PBMCs from one well were used to estimate the frequency/amount of WT1 126-134 peptide-specific CD8+ T cells in the culture by flow cytometry upon staining with: a viability stain, appropriate WT1 126-134-peptide-specific HLA-A*0201 tetramers (MBL International) and antibodies against CD69, CD3, CD14, CD19, CD127, CD56. CD4 (Biolegend), CD8, CD25 (BD Biosciences). Stained cells were washed and analyzed by flow cytometry. Data acquisition was performed using the Attune NxT flow cytometer instrument (Invitrogen). The acquired data was exported as fcs files and analyzed using the Flowjo software (Tree Star, OR).

[0908] At least two wells were used to enrich for CD8+ T cells using a CD8+ T cell negative selection kit from Stem Cell Technologies. The purified CD8+ T cells were restimulated for 8 days with the WT1 126-134 specific Immuno-STATs on the R12C/G2C framework in the presence of autologous PBMCs, previously treated with mitomycin C, in a 1:2 ratio, with a final 5-10 million cells in a volume of 4 ml of Immunocult media per well. WT1 126-134 specific Immuno-STAT on the R12C/G2C framework was used at the concentration previously established to be optimal for that donor.

[0909] Upon culture, the cells were harvested and pelleted by centrifugation at 350 g for 5 minutes, live cell counts were determined by the Countess automated cell counter (Invitrogen, CA) and CD8+ T cells were enriched using a CD8+ T cell negative selection kit from Stem Cell Technologies.

[0910] Target cells, T2 cells (ATCC), were pulsed with 5 μg/mL of the WT1 126-134 peptide, the WT1 126-134 R126Y peptide or the human immunodeficiency virus-1 (HIV-1) Gag₇₇₋₈₅ SL9 peptide for 2 hours at 37° C., 5% CO₂. Post-peptide loading, the T2 cells were washed twice and resuspend in ImmunoCult™-XF Cell Expansion Media (Stemcell Technologies).

[0911] The enriched CD8+ T cells and the peptide-loaded T2 cells were mixed at a 1:1 ratio (1×10^{f} cells each) in a final volume of 200 μL per well in 96-well plates. Media and Phorbol 12-myristate; 13-acetate (PMA)/ionomycin was added to control wells as negative and positive controls, respectively. At 0.5 to 1 hour post-stimulation, the staining antibody against CD107a was added directly to the cells. Cell were stimulated for 5 hours, washed with PBS and stained for viability using the FVS780 for 10 minutes on ice. The cells were washed stained with the WT1 126-134 peptide-specific tetramers (labeled with APC and PE) for 15 minutes at room temperature. Subsequently, the cells were washed and stained antibodies against CD3 and CD8 for 30 minutes on ice. Stained cells were washed twice and resuspended in intracellular (IC) fixation buffer overnight at 4° C. The following day, the cells were washed and resuspended in permeabilization buffer and incubated for 5 minutes at room temperature. Permeabilized cells were washed and stained with antibodies against interferon-γ (IFN-γ), tumor-necrosis factor-α (TNF-α), resuspended in permeabilization buffer, for 30 minutes at room temperature. Stained cells were washed, resuspended in 2 mL of FACS buffer, and transferred to a 96-well deep plate. Data acquisition was performed using the Attune NxT flow cytometer instrument (Thermofisher Scientific, MA). The acquired data was exported as fcs files and analyzed using the Flowjo software (Tree Star, OR).

### FIG. 25

[0912] Human healthy donor PBMCs were prepared from leukopaks obtained from Hemacare (Northridge, Calif.) and kept cryopreserved at −150° C. until the day of experiment.

[0913] The cells were thawed on the day of the experiment in a water bath for 1 minute, washed with 10 mL of warm ImmunoCult™-XF Cell Expansion Media (Stemcell Technologies, Vancouver, Canada), pelleted by centrifugation (350 g, 5 minutes), and resuspended in 10 mL media. Cells were counted using the Countess automated cell counter (invitrogen, CA), the media volume was adjusted to bring the cell concentration to 3.8×10⁶ cell/mL and 237.5 uL of the cell suspensions were added into round bottom 96-well plates.

[0914] 20× dilution series of the indicated Immuno-STATs and of rh-IL-2, were prepared in Immunocult media. To stimulate the PBMCs, 12.5 μL of the 20× dilution series was added to the wells containing the cells and mixed to obtain the final assay drug concentrations. The PBMCs were incubated at 37° C., 5% CO₂ for 20 to 24 hours.

[0915] Upon stimulation, the cells were pelleted by centrifugation at 350 g for 5 minutes. Supernatants were collected, frozen and stored at −20° C. until further analysis. Pelleted PBMCs were washed twice with PBS and stained for 10 minutes at 4° C. in 50 μL of Fixable live/dead FVS780 stain. The staining was quenched with 200 μL of stain buffer and the cells were pelleted by centrifugation (350×g, 5 minutes). The cells were stained for 30 minutes at 4° C. with antibodies against CD3, CD4, CD8, CD14, CD19, CD56, and CD69 in 50 μL volume. Upon staining cells were washed with stain buffer, pelleted by centrifugation (350×g, 5 minutes), resuspended in 130, of stain buffer and analyzed by Flow Cytometry using the Attune® Flow Cytometer. The acquired data was exported as fcs files and analyzed using the Flowjo software (Tree Star, OR).

[0916] CD69 upregulation was assessed on different cell subsets that are sensitive to upregulate CD69 upon IL-2 stimulation. Based on expression levels of the surface markers used in the staining, gates were made to identify NK cells, CD8+ T cells, CD4+ T cells.

### FIG. 26

[0917] One day before the assay, CTLL-2 cells were washed with media and cultured at 1×10′ cells/ml in a 75-T flask for 24 hours at 37 C, 5% CO₂ for IL-2 starvation. After the 24 hour starvation culture, cells were seeded at 5000 cells per well in 100 microliters/well of a 96 well cell culture cluster flat bottom plate with lid (Costar corning, Cat #3599). Cell viability and count were checked before stimulation using Vi cell viability analyzer (Beckman-Coulter).

[0918] Dilution series (10 points; 3-fold dilution steps) of the indicated Immuno-STATs (TMMPs) or proleukin (Prometheus Therapeutics) were prepared in complete RPMI supplemented with 10% HI FBS as 2× stocks of the final assay concentrations. 100 μL of this 2× dilution series were added to cells previously seeded in 96 well plates and mixed to obtain the final assay drug concentrations. Each concentration was tested in triplicates. Cells were incubated for three days at 37 C, 5% CO₂.

[0919] After three days in culture 100 μL of cells from each well was transferred into a flat bottom white tissue culture treated 96 well plate. 100 μL of CellTiter-Glo® Reagent was prepared using CellTiter-Glo Luminescent Cell viability assay kit (Promega cat #G7571) following instructions provided by the manufacturer and were added to the cells. Cells and CellTiter-Glo® Reagent were mixed by placing the plates on an orbital shaker for 2 minutes to induce cell lysis. Then plates were incubated at room temperature for 10 minutes to stabilize luminescent signal. The luminescence was measured and recorded on Biotek synergy neo2 multimode reader, software Gen5 3.04.

### FIG. 27

[0920] All experiments were performed on the Octet HTX system (ForteBio). Anti-penta-his (HIS1K) kinetic grade biosensors (ForteBio, #18-5122) were hydrated in assay buffer and preconditioned in pH 1.7 glycine. The assay buffer was used for all assays except for FcRn. The buffer used for FcRn was PBS, 0.1% bovine scrum albumin (BSA), 0.02% Tween-20, pH 7.2. The assay buffer used for the FcRn reagents was PBS, 0.1% BSA, 0.02% Tween-20, pH 6.

[0921] Each His-tagged receptor was immobilized onto HIS1K biosensors at a concentration of 5 g/mL (except for FcRI: 10 ug/mL) for 120 seconds. The antigen-loaded HIS1K biosensors were then dipped into a 7-point, 1:3 dilution series of each individual antibody starting from 300 nM. A well containing only assay buffer was used to test for non-specific binding between the buffer and loaded biosensors. Association was observed for 60 seconds, followed by 60 seconds of dissociation. A short baseline (60 seconds) was established using dissociation buffer after HIS1K loading.

[0922] While the present invention has been described with reference to the specific embodiments thereof, it should be understood by those skilled in the art that various changes may be made and equivalents may be substituted without departing from the true spirit and scope of the invention. In addition, many modifications may be made to adapt a particular situation, material, composition of matter, process, process step or steps, to the objective, spirit and scope of the present invention. All such modifications are intended to be within the scope of the claims appended hereto.

The application's sequence listing, which the Patent Office published only in electronic form, follows.

SEQUENCE LISTING (450 sequences)

SEQ ID NO: 1 - protein, 245 aa, Homo sapiens
MRIFAVFIFMTYWHLLNAFTVTVPKDLYVVEYGSNMTIECKFPVEKQLDLAALIVYWEMEDKNIIQFVHGEEDLKVQHSSYRQRARLLKDQLSLGNAALQITDVKLQDAGVYRCMISYGGADYKRITVKVNAPYNKINQRILVVDPVTSEHELTCQAEGYPKAEVIWTSSDHQVLSGKTTTTNSKREEKLFNVTSTLRINTTTNEIFYCTFRRLDPEENHTAELVIPGNILNVSIKICLTLSPST

SEQ ID NO: 2 - protein, 219 aa, Homo sapiens
FTVTVPKDLYVVEYGSNMTIECKFPVEKQLDLAALIVYWEMEDKNIIQFVHGEEDLKVQHSSYRQRARLLKDQLSLGNAALQITDVKLQDAGVYRCMISYGGADYKRITVKVNAPYNKINQRILVVDPVTSEHELTCQAEGYPKAEVIWTSSDHQVLSGKTTTTNSKREEKLFNVTSTLRINTTTNEIFYCTFRRLDPEENHTAELVIPGNILNVSIKI

SEQ ID NO: 3 - protein, 268 aa, Homo sapiens
PGWFLDSPDRPWNPPTFSPALLVVTEGDNATFTCSFSNTSESFVLNWYRMSPSNQTDKLAAFPEDRSQPGQDCRFRVTQLPNGRDFHMSVVRARRNDSGTYLCGAISLAPKAQIKESLRAELRVTERRAEVPTAHPSPSPRPAGQFQTLVVGVVGGLLGSLVLLVWVLAVICSRAARGTIGARRTGQPLKEDPSAVPVFSVDYGELDFQWREKTPEPPVPCVPEQTEYATIVFPSGMGTSSPARRGSADGPRSAQPLRPEDGHCSWPL

SEQ ID NO: 4 - protein, 208 aa, Homo sapiens [sequence omitted]

SEQ ID NO: 5 - protein, 220 aa, Homo sapiens
MLRLLLALNLFPSIQVTGNKILVKQSPMLVAYDNAVNLSCKYSYNLFSREFRASLHKGLDSAVEVCVVYGNYSQQLQVYSKTGFNCDGKLGNESVTFYLQNLYVNQTDIYFCKIEVMYPPPYLDNEKSNGTIIHVKGKHLCPSPLFPGPSKPFWVLVVVGGVLACYSLLVTVAFIIFWVRSKRSRLLHSDYMNMTPRRPGPTRKHYQPYAPPRDFAAYRS

SEQ ID NO: 6 - protein, 123 aa, Homo sapiens
MLRLLLALNLFPSIQVTGNKILVKQSPMLVAYDNAVNLSWKHLCPSPLFPGPSKPFWVLVVVGGVLACYSLLVTVAFIIFWVRSKRSRLLHSDYMNMTPRRPGPTRKHYQPYAPPRDFAAYRS

SEQ ID NO: 7 - protein, 101 aa, Homo sapiens
MLRLLLALNLFPSIQVTGKHLCPSPLFPGPSKPFWVLVVVGGVLACYSLLVTVAFIIFWVRSKRSRLLHSDYMNMTPRRPGPTRKHYQPYAPPRDFAAYRS

SEQ ID NO: 8 - protein, 224 aa, Homo sapiens
APLKIQAYFNETADLPCQFANSQNQSLSELVVFWQDQENLVLNEVYLGKEKFDSVHSKYMNRTSFDSDSWTLRLHNLQIKDKGLYQCIIHHKKPTGMIRIHQMNSELSVLANFSQPEIVPISNITENVYINLTCSSIHGYPEPKKMSVLLRTKNSTIEYDGIMQKSQDNVTELYDVSISLSVSFPDVTSNMTIFCILETDKTRLLSSPFSIELEDPQPPPDHIP

SEQ ID NO: 9 - protein, 110 aa, Homo sapiens
APLKIQAYFNETADLPCQFANSQNQSLSELVVFWQDQENLVLNEVYLGKEKFDSVHSKYMNRTSFDSDSWTLRLHNLQIKDKGLYQCIIHHKKPTGMIRIHQMNSELSVL

SEQ ID NO: 10 - protein, 254 aa, Homo sapiens
MEYASDASLDPEAPWPPAPRARACRVLPWALVAGLLLLLLLAAACAVFLACPWAVSGARASPGSAASPRLREGPELSPDDPAGLLDLRQGMFAQLVAQNVLLIDGPLSWYSDPGLAGVSLTGGLSYKEDTKELVVAKAGVYYVFFQLELRRVVAGEGSGSVSLALHLQPLRSAAGAAALALTVDLPPASSEARNSAFGFQGRLLHLSAGQRLGVHLHTEARARHAWQLTQGATVLGLFRVTPEIPAGLPSPRSE

SEQ ID NO: 11 - protein, 174 aa, Homo sapiens
PAGLLDLRQGMFAQLVAQNVLLIDGPLSWYSDPGLAGVSLTGGLSYKEDTKELVVAKAGVYYVFFQLELRRVVAGEGSGSVSLALHLQPLRSAAGAAALALTVDLPPASSEARNSAFGFQGRLLHLSAGQRLGVHLHTEARARHAWQLTQGATVLGLFRVTPEIPAGLPSPRSE

SEQ ID NO: 12 - protein, 175 aa, Homo sapiens
DPAGLLDLRQGMFAQLVAQNVLLIDGPLSWYSDPGLAGVSLTGGLSYKEDTKELVVAKAGVYYVFFQLELRRVVAGEGSGSVSLALHLQPLRSAAGAAALALTVDLPPASSEARNSAFGFQGRLLHLSAGQRLGVHLHTEARARHAWQLTQGATVLGLFRVTPEIPAGLPSPRSE

SEQ ID NO: 13 - protein, 167 aa, Homo sapiens
DPAGLLDLRQGMFAQLVAQNVLLIDGPLSWYSDPGLAGVSLTGGLSYKEDTKELVVAKAGVYYVFFQLELRRVVAGEGSGSVSLALHLQPLRSAAGAAALALTVDLPPASSEARNSAFGFQGRLLHLSAGQRLGVHLHTEARARHAWQLTQGATVLGLFRVTPEIPA

SEQ ID NO: 14 - protein, 255 aa, Homo sapiens
MGNSCYNIVATLLLVLNFERTRSLQDPCSNCPAGTFCDNNRNQICSPCPPNSFSSAGGQRTCDICRQCKGVFRTRKECSSTSNAECDCTPGFHCLGAGCSMCEQDCKQGQELTKKGCKDCCFGTFNDQKRGICRPWTNCSLDGKSVLVNGTKERDVVCGPSPADLSPGASSVTPPAPAREPGHSPQIISFFLALTSTALLFLLFFLTLRFSVVKRGRKKLLYIFKQPFMRPVQTTQEEDGCSCRFPEEEEGGCEL

SEQ ID NO: 15 - protein, 133 aa, Homo sapiens [sequence omitted]

SEQ ID NO: 16 - protein, 251 aa, Homo sapiens
ELCDDDPPEIPHATFKAMAYKEGTMLNCECKRGFRRIKSGSLYMLCTGNSSHSSWDNQCQCTSSATRNTTKQVTPQPEEQKERKTTEMQSPMQPVDQASLPGHCREPPPWENEATERIYHFVVGQMVYYQCVQGYRALHRGPAESVCKMTHGKTRWTQPQLICTGEMETSQFPGEEKPQASPEGRPESETSCLVTTTDFQIQTEMAATMETSIFTTEYQVAVAGCVFLLISVLLLSGLTWQRRQRKSRRTI

SEQ ID NO: 17 - protein, 524 aa, Homo sapiens
VNGTSQFTCFYNSRANISCVWSQDGALQDTSCQVHAWPDRRRWNQTCELLPVSQASWACNLILGAPDSQKLTTVDIVTLRVLCREGVRWRVMAIQDFKPFENLRLMAPISLQVVHVETHRCNISWEISQASHYFERHLEFEARTLSPGHTWEEAPLLTLKQKQEWICLETLTPDTQYEFQVRVKPLQGEFTTWSPWSQPLAFRTKPAALGKDTIPWLGHLLVGLSGAFGFIILVYLLINCRNTGPWLKKVLKCNTPDPSKFFSQLSSEHGGDVQKWLSSPFPSSSFSPGGLAPEISPLEVLERDKVTQLLLQQDKVPEPASLSSNHSLTSCFTNQGYFFFHLPDALEIEACQVYFTYDPYSEEDPDEGVAGAPTGSSPQPLQPLSGEDDAYCTFPSRDDLLLFSPSLLGGPSPPSTAPGGSGAGEERMPPSLQERVPRDWDPQPLGPPTPGVPDLVDFQPPPELVLREAGEEVPDAGPREGVSFPWSRPPGQGEFRALNARLPLNTDAYLSLQELQGQDPTHLV

SEQ ID NO: 18 - protein, 347 aa, Homo sapiens
LNTTILTPNGNEDTTADFFLTTMPTDSLSVSTLPLPEVQCFVFNVEYMNCTWNSSSEPQPTNLTLHYWYKNSDNDKVQKCSHYLFSEEITSGCQLQKKEIHLYQTFVVQLQDPREPRRQATQMLKLQNLVIPWAPENLTLHKLSESQLELNWNNRFLNHCLEHLVQYRTDWDHSWTEQSVDYRHKFSLPSVDGQKRYTFRVRSRFNPLCGSAQHWSEWSHPIHWGSNTSKENPFLFALEAVVISVGSMGLIISLLCVYFWLERTMPRIPTLKNLEDLVTEYHGNFSAWSGVSKGLAESLQPDYSERLCLVSEIPPKGGALGEGPGASPCNQHSPYWAPPCYTLKPET

SEQ ID NO: 19 - protein, 119 aa, Homo sapiens
MSRSVALAVLALLSLSGLEAIQRTPKIQVYSRHPAENGKSNFLNCYVSGFHPSDIEVDLLKNGERIEKVEHSDLSFSKDWSFYLLYYTEFTPTEKDEYACRVNHVTLSQPKIVKWDRDM

SEQ ID NO: 20 - protein, 119 aa, Macaca mulatta
MSRSVALAVLALLSLSGLEAIQRTPKIQVYSRHPPENGKPNFLNCYVSGFHPSDIEVDLLKNGEKMGKVEHSDLSFSKDWSFYLLYYTEFTPNEKDEYACRVNHVTLSGPRTVKWDRDM

SEQ ID NO: 21 - protein, 118 aa, Bos Taurus
MARFVALVLLGLLSLSGLDAIQRPPKIQVYSRHPPEDGKPNYLNCYVYGFHPPQIEIDLLKNGEKIKSEQSDLSFSKDWSFYLLSHAEFTPNSKDQYSCRVKHVTLEQPRIVKWDRDL

SEQ ID NO: 22 - protein, 119 aa, Mus musculus
MARSVTLVFLVLVSLTGLYAIQKTPQIQVYSRHPPENGKPNILNCYVTQFHPPHIEIQMLKNGKKIPKVEMSDMSFSKDWSFYILAHTEFTPTETDTYACRVKHASMAEPKTVYWDRDM

SEQ ID NO: 23 - protein, 365 aa, Homo sapiens
MAVMAPRTLLLLLSGALALTQTWAGSHSMRYFFTSVSRPGRGEPRFIAVGYVDDTQFVRFDSDAASQKMEPRAPWIEQEGPEYWDQETRNMKAHSQTDRANLGTLRGYYNQSEDGSHTIQIMYGCDVGPDGRFLRGYRQDAYDGKDYIALNEDLRSWTAADMAAQITKRKWEAVHAAEQRRVYLEGRCVDGLRRYLENGKETLQRTDPPKTHMTHHPISDHEATLRCWALGFYPAEITLTWQRDGEDQTQDTELVETRPAGDGTFQKWAAVVVPSGEEQRYTCHVQHEGLPKPLTLRWELSSQPTIPIVGIIAGLVLLGAVITGAVVAAVMWRRKSSDRKGGSYTQAASSDSAQGSDVSLTACKV

SEQ ID NO: 24 - protein, 365 aa, Homo sapiens
MAVMAPRTLLLLLSGALALTQTWAGSHSMRYFYTSVSRPGRGEPRFIAVGYVDDTQFVRFDSDAASQRMEPRAPWIEQEGPEYWDQETRNVKAQSQTDRVDLGTLRGYYNQSEDGSHTIQIMYGCDVGPDGRFLRGYRQDAYDGKDYIALNEDLRSWTAADMAAQITKRKWEAAHAAEQQRAYLEGRCVEWLRRYLENGKETLQRTDPPKTHMTHHPISDHEATLRCWALGFYPAEITLTWQRDGEDQTQDTELVETRPAGDGTFQKWAAVVVPSGEEQRYTCHVQHEGLPKPLTLRWELSSQPTIPIVGIIAGLVLLGAVITGAVVAAVMWRRKSSDRKGGSYTQAASSDSAQGSDVSLTACKV

SEQ ID NO: 25 - protein, 365 aa, Homo sapiens [sequence omitted]

SEQ ID NO: 26 - protein, 365 aa, Homo sapiens [sequence omitted]

SEQ ID NO: 27 - protein, 362 aa, Homo sapiens
MLVMAPRTVLLLLSAALALTETWAGSHSMRYFYTSVSRPGRGEPRFISVGYVDDTQFVRFDSDAASPREEPRAPWIEQEGPEYWDRNTQIYKAQAQTDRESLRNLRGYYNQSEAGSHTLQSMYGCDVGPDGRLLRGHDQYAYDGKDYIALNEDLRSWTAADTAAQITQRKWEAAREAEQRRAYLEGECVEWLRRYLENGKDKLERADPPKTHVTHHPISDHEATLRCWALGFYPAEITLTWQRDGEDQTQDTELVETRPAGDRTFQKWAAVVVPSGEEQRYTCHVQHEGLPKPLTLRWEPSSQSTVPIVGIVAGLAVLAVVVIGAVVAAVMCRRKSSGGKGGSYSQAACSDSAQGSDVSLTA

SEQ ID NO: 28 - protein, 366 aa, Homo sapiens
MRVMAPRALLLLLSGGLALTETWACSHSMRYFDTAVSRPGRGEPRFISVGYVDDTQFVRFDSDAASPRGEPRAPWVEQEGPEYWDRETQNYKRQAQADRVSLRNLRGYYNQSEDGSHTLQRMYGCDLGPDGRLLRGYDQSAYDGKDYIALNEDLRSWTAADTAAQITQRKLEAARAAEQLRAYLEGTCVEWLRRYLENGKETLQRAEPPKTHVTHHPLSDHEATLRCWALGFYPAEITLTWQRDGEDQTQDTELVETRPAGDGTFQKWAAVVVPSGQEQRYTCHMQHEGLQEPLTLSWEPSSQPTIPIMGIVAGLAVLVVLAVLGAVVTAMMCRRKSSGGKGGSCSQAACSNSAQGSDESLITCKA

SEQ ID NO: 29 - protein, 276 aa, Artificial sequence
  synthetic sequence
  Misc_feature (9)..(9): X is phenylalanine, tyrosine, serine, or threonine
  Misc_feature (44)..(44): X is lysine or arginine
  Misc_feature (62)..(62): X is glutamine, glycine, glutamic acid, or arginine
  Misc_feature (63)..(63): X is asparagine or glutamic acid
  Misc_feature (65)..(65): X is arginine or glycine
  Misc_feature (66)..(66): X is asparagine or lysine
  Misc_feature (67)..(67): X is methionine or valine
  Misc_feature (70)..(70): X is histidine or glutamine
  Misc_feature (73)..(73): X is threonine or isoleucine
  Misc_feature (74)..(74): X is aspartic acid or histidine
  Misc_feature (76)..(76): X is alanine, valine, or glutamic acid
  Misc_feature (77)..(77): X is asparagine or aspartic acid
  Misc_feature (79)..(79): X is glycine or arginine
  Misc_feature (80)..(80): X is threonine or arginine
  Misc_feature (81)..(81): X is leucine or alanine
  Misc_feature (82)..(82): X is arginine or leucine
  Misc_feature (83)..(83): X is glycine ir arginine
  Misc_feature (90)..(90): X is alanine or aspartic acid
  Misc_feature (95)..(95): X is isoleucine, leucine, or valine
  Misc_feature (97)..(97): X is isoleucine, arginine, or methionine
  Misc_feature (99)..(99): X is phenylalanine or tyrosine
  Misc_feature (105)..(105): X is serine or proline
  Misc_feature (107)..(107): X is tryptophan or glycine
  Misc_feature (114)..(114): X is arginine, histidine, or glutamine
  Misc_feature (116)..(116): X is aspartic acid or tyrosine
  Misc_feature (127)..(127): X is asparagine or lysine
  Misc_feature (142)..(142): X is threonine or isoleucine
  Misc_feature (144)..(144): X is lysine or glutamine
  Misc_feature (145)..(145): X is arginine or histidine
  Misc_feature (149)..(149): X is alanine or threonine
  Misc_feature (150)..(150): X is alanine or valine
  Misc_feature (151)..(151): X is histidine or arginine
  Misc_feature (156)..(156): X is arginine, leucine, glutamine, or tryptophan
  Misc_feature (158)..(158): X is valine or alanine
  Misc_feature (161)..(161): X is aspartic acid or glutamic acid
  Misc_feature (163)..(163): X is arginine or threonine
  Misc_feature (166)..(166): X is aspartic acid or glutamic acid
  Misc_feature (167)..(167): X is tryptophan or glycine
  Misc_feature (184)..(184): X is proline or alanine
  Misc_feature (193)..(193): X is proline or alanine
  Misc_feature (194)..(194): X is valine or isoleucine
  Misc_feature (207)..(207): X is serine or glycine
  Misc_feature (246)..(246): X is alanine or serine
  Misc_feature (253)..(253): X is glutamine or glutamic acid
  Misc_feature (276)..(276): X is proline or leucine
GSHSMRYFXTSVSRPGRGEPRFIAVGYVDDTQFVRFDSDAASQXMEPRAPWIEQEGPEYWDXXTXXXKAXSQXXRXXLXXXXXYYNQSEXGSHTXQXMXGCDVGXDXRFLRGYXQXAYDGKDYIALXEDLRSWTAADMAAQXTXXKWEXXXEAEQXRXYLXGXCVXXLRRYLENGKETLQRTDXPKTHMTHHXXSDHEATLRCWALXFYPAEITLTWQRDGEDQTQDTELVETRPAGDGTFQKWAXVVVPSGXEQRYTCHVQHEGLPKPLTLRWEX

SEQ ID NO: 30 - protein, 276 aa, Artificial sequence
  synthetic sequence
  Misc_feature (9)..(9): X is histidinem tyrosine, or aspartic acid
  Misc_feature (11)..(11): X is alanien or serine
  Misc_feature (12)..(12): X is methionine or valine
  Misc_feature (24)..(24): X is alanine, serine, or threonine
  Misc_feature (32)..(32): X is glutamie or leucine
  Misc_feature (41)..(41): X is alanine or threonine
  Misc_feature (45)..(45): X is glutamic acid, methionine, lysine, or threonine
  Misc_feature (46)..(46): X is alanine or threonine
  Misc_feature (63)..(63): X is glutamic acid or asparagine
  Misc_feature (66)..(66): X is isoleucine or lysine
  Misc_feature (67)..(67): X is tyrosine, phenylalanie, serine, or cystine
  Misc_feature (70)..(70): X is asparagine or glutamine
  Misc_feature (71)..(71): X is alanine or threonine
  Misc_feature (74)..(74): X is aspartic acid or tyrosine
  Misc_feature (76)..(76): X is glutamic acid or valine
  Misc_feature (77)..(77): X is serine or asparagine
  Misc_feature (80)..(80): X is threonine, asparagine, or isoleucine
  Misc_feature (81)..(81): X is alanine or leucine
  Misc_feature (82)..(82): X is leucine or arginine
  Misc_feature (83)..(83): X is arginine or glycine
  Misc_feature (94)..(94): X is threonine or isoleucine
  Misc_feature (95)..(95): X is leucine or isoleucine
  Misc_feature (97)..(97): X is arginine or serine
  Misc_feature (131)..(131): X is arginine or serine
  Misc_feature (143)..(143): X is S or T
  Misc_feature (147)..(147): X is L or W
  misc_feature (152)..(152): Xaa is E OR V
  misc_feature (156)..(156): Xaa is R, D, L
  misc_feature (158)..(158): Xaa A or T
  Misc_feature (163)..(163): X is leucine, glutamic acid, or threonine
  Misc_feature (177)..(177): X is glutamic acid or aspartic acid
  Misc_feature (178)..(178): X is lysine or threonine
  Misc_feature (180)..(180): X is glutamic acid or glutamine
  Misc_feature (194)..(194): X is isoleucine or valine
GSHSMRYFXTXXSRPGRGEPRFIXVGYVDDTXFVRFDSDAXSPRXXPRAPWIEQEGPEYWDRXTQXXKTXXTQXYXXNLXXXXYYNQSEAGSHXXQXMYGCDLGPDGRLLRGHDQSAYDGKDYIALNEDLXSWTAADTAAQIXQRKXEAARXAEQXRXYLEGXCVEWLRRYLENGKXXLXRADPPKTHVTHHPXSDHEATLRCWALGFYPAEITLTWQRDGEDQTQDTELVETRPAGDRTFQKWAAVVVPSGEEQRYTCHVQHEGLPKPLTLRWEP

SEQ ID NO: 31 - protein, 276 aa, Artificial sequence
  synthetic sequence
  Misc_feature (1)..(1): X is cysteine or glycine
  Misc_feature (6)..(6): X is arginine or lysine
  Misc_feature (9)..(9): X is phenylalanine, tyrosine, serine, or aspartic acid
  Misc_feature (14)..(14): X is arginine or tryptophan
  Misc_feature (21)..(21): X is histidine or arginine
  Misc_feature (24)..(24): X is alanine or serine
  Misc_feature (35)..(35): X is glutamine or arginine
  Misc_feature (49)..(49): X is alanine or arginine
  Misc_feature (66)..(66): X is asparagine, or lysine
  Misc_feature (73)..(73): X is threonine or alanine
  Misc_feature (77)..(77): X is serine or asparagine
  Misc_feature (80)..(80): X is asparagine or lysine
  Misc_feature (90)..(90): X is alanine or aspartic acid
  Misc_feature (91)..(91): X is glycine or arginine
  Misc_feature (94)..(94): X is threonine or isoleucine
  Misc_feature (95)..(95): X is leucine or isoleucine
  Misc_feature (97)..(97): X is tryptophan or arginine
  Misc_feature (99)..(99): X is cysteine, tyrosine, phenylalanine, or serine
  Misc_feature (103)..(103): X is leucine or valine
  Misc_feature (113)..(113): X is tyrosine or histidine
  Misc_feature (114)..(114): X is aspartic acid or asparagine
  Misc_feature (116)..(116): X is tyrosine, phenylalanine, serine, or leucine
  Misc_feature (147)..(147): X is leucine or tryptophan
  Misc_feature (152)..(152): X is glutamic acid, alanine, or threonine
  Misc_feature (156)..(156): X is arginine, leucine, or tryptophan
  Misc_feature (163)..(163): X is leucine or threonine
  Misc_feature (173)..(173): X is glutamic acid or lysine
  Misc_feature (177)..(177): X is glutamic acid or lysine
  Misc_feature (184)..(184): X is histidine or proline
  Misc_feature (194)..(194): X is arginine or valine
  Misc_feature (219)..(219): X is tryptophan or arginine
  Misc_feature (248)..(248): X is valine or methionine
  Misc_feature (253)..(253): X is glutamic acid or lysine
  Misc_feature (261)..(261): X is methionine or valine
  Misc_feature (267)..(267): X is proline or glutamine
  Misc_feature (273)..(273): X is arginine or serine
  Misc_feature (275)..(275): X is proline or glycine
XSHSMXYFXTAVSXPGRGEPXFIXVGYVDDTQFVXFDSDAASPRGEPRXPWVEQEGPEYWDRETQXYKRQAQXDRVXLRXLRGYYNQSEXXSHXXQXMXGCDXGPDGRLLRGXXQXAYDGKDYIALNEDLRSWTAADTAAQITQRKXEAARXAEQXRAYLEGXCVEWLRRYLXNGKXTLQRAEXPKTHVTHHPXSDHEATLRCWALGFYPAEITLTWQXDGEDQTQDTELVETRPAGDGTFQKWAAVXVPSGXEQRYTCHXQHEGLXEPLTLXWXP

SEQ ID NO: 32 - protein, 284 aa, Artificial sequence
  synthetic sequence
  misc_feature (89)..(89): Xaa is K or E
  misc_feature (107)..(107): Xaa is R or G
  misc_feature (157)..(157): Xaa is R or G
  misc_feature (158)..(158): Xaa is A or V
  misc_feature (255)..(255): Xaa is Q or P
  misc_feature (267)..(267): Xaa is P or S
GSHSLKYFHTSVSRPGRGEPRFISVGYVDDTQFVRFDNDAASPRMVPRAPWMEQEGSEYWDRETRSARDTAQIFRVNLRTLRGYYNQSXAGSHTLQWMHGCELGPDXRFLRGYEQFAYDGKDYLTLNEDLRSWTAVDTAAQISEQKSNDASEAEHQXXYLEDTCVEWLHKYLEKGKETLLHLEPPKTHVTHHPISDHEATLRCWALGFYPAEITLTWQQDGEGHTQDTELVETRPAGDGTFQKWAAVVVPSGEEXRYTCHVQHEGLXEPVTLRWKPASQPTIPI

SEQ ID NO: 33 - protein, 284 aa, Artificial sequence
  synthetic sequence
  misc_feature (7)..(7): Xaa is Y or F
  misc_feature (50)..(50): Xaa is P or Q
  misc_feature (251)..(251): Xaa is S or P
  misc_feature (278)..(278): Xaa is P or L
GSHSLRXFSTAVSRPGRGEPRYIAVEYVDDTQFLRFDSDAAIPRMEPREXWVEQEGPQYWEWTTGYAKANAQTDRVALRNLLRRYNQSEAGSHTLQGMNGCDMGPDGRLLRGYHQHAYDGKDYISLNEDLRSWTAADTVAQITQRFYEAEEYAEEFRTYLEGECLELLRRYLENGKETLQRADPPKAHVAHHPISDHEATLRCWALGFYPAEITLTWQRDGEEQTQDTELVETRPAGDGTFQKWAAVVVPXGEEQRYTCHVQHEGLPQPLILRWEQSXQPTIPI

SEQ ID NO: 34 - protein, 284 aa, Artificial sequence
  synthetic sequence
  misc_feature (13)..(13): Xaa is S or F
  misc_feature (27)..(27): Xaa is Y or H
  misc_feature (31)..(31): Xaa is T, S, or M
  misc_feature (34)..(34): Xaa is L or V
  misc_feature (54)..(54): Xaa is Q or R
  misc_feature (81)..(81): Xaa is P or L
  misc_feature (100)..(100): Xaa is G or D
  misc_feature (104)..(104): Xaa is G or V
  misc_feature (105)..(105): Xaa is S or C
  misc_feature (110)..(110): Xaa is L or I
  misc_feature (159)..(159): Xaa is Y or H
  misc_feature (169)..(169): Xaa is H or R
  misc_feature (171)..(171): Xaa is Y or H
  misc_feature (178)..(178): Xaa is M or T
  misc_feature (185)..(185): Xaa is P or A
  misc_feature (219)..(219): Xaa is R, W, or Q
  misc_feature (258)..(258): Xaa is T or M
  misc_feature (275)..(275): Xaa is K or E
GSHSMRYFSAAVXRPGRGEPRFIAMGXVDDXQFXRFDSDSACPRMEPRAPWVEXEGPEYWEEETRNTKAHAQTDRMNLQTXRGYYNQSEASSHTLQWMIXCDLXXDGRLXRGYEQYAYDGKDYLALNEDLRSWTAADTAAQISKRKCEAANVAEQRRAXLEGTCVEWLXRXLENGKEXLQRADPXKTHVTHHPVFDYEATLRCWALGFYPAEIILTWQXDGEDQTQDVELVETRPAGDGTFQKWAAVVVPSGEEQRYXCHVQHEGLPEPLMLRWXQSSLPTIPI

SEQ ID NO: 35 - protein, 276 aa, Artificial sequence; identical to SEQ ID NO: 29
  synthetic sequence
  Misc_feature (9)..(9): X is phenylalanine, tyrosine, serine, or threonine
  Misc_feature (44)..(44): X is lysine or arginine
  Misc_feature (62)..(62): X is glutamine, glycine, glutamic acid, or arginine
  Misc_feature (63)..(63): X is asparagine or glutamic acid
  Misc_feature (65)..(65): X is arginine or glycine
  Misc_feature (66)..(66): X is asparagine or lysine
  Misc_feature (67)..(67): X is methionine or valine
  Misc_feature (70)..(70): X is histidine or glutamine
  Misc_feature (73)..(73): X is threonine or isoleucine
  Misc_feature (74)..(74): X is aspartic acid or histidine
  Misc_feature (76)..(76): X is alanine, valine, or glutamic acid
  Misc_feature (77)..(77): X is asparagine or aspartic acid
  Misc_feature (79)..(79): X is glycine or arginine
  Misc_feature (80)..(80): X is threonine or arginine
  Misc_feature (81)..(81): X is leucine or alanine
  Misc_feature (82)..(82): X is arginine or leucine
  Misc_feature (83)..(83): X is glycine ir arginine
  Misc_feature (90)..(90): X is alanine or aspartic acid
  Misc_feature (95)..(95): X is isoleucine, leucine, or valine
  Misc_feature (97)..(97): X is isoleucine, arginine, or methionine
  Misc_feature (99)..(99): X is phenylalanine or tyrosine
  Misc_feature (105)..(105): X is serine or proline
  Misc_feature (107)..(107): X is tryptophan or glycine
  Misc_feature (114)..(114): X is arginine, histidine, or glutamine
  Misc_feature (116)..(116): X is aspartic acid or tyrosine
  Misc_feature (127)..(127): X is asparagine or lysine
  Misc_feature (142)..(142): X is threonine or isoleucine
  Misc_feature (144)..(144): X is lysine or glutamine
  Misc_feature (145)..(145): X is arginine or histidine
  Misc_feature (149)..(149): X is alanine or threonine
  Misc_feature (150)..(150): X is alanine or valine
  Misc_feature (151)..(151): X is histidine or arginine
  Misc_feature (156)..(156): X is arginine, leucine, glutamine, or tryptophan
  Misc_feature (158)..(158): X is valine or alanine
  Misc_feature (161)..(161): X is aspartic acid or glutamic acid
  Misc_feature (163)..(163): X is arginine or threonine
  Misc_feature (166)..(166): X is aspartic acid or glutamic acid
  Misc_feature (167)..(167): X is tryptophan or glycine
  Misc_feature (184)..(184): X is proline or alanine
  Misc_feature (193)..(193): X is proline or alanine
  Misc_feature (194)..(194): X is valine or isoleucine
  Misc_feature (207)..(207): X is serine or glycine
  Misc_feature (246)..(246): X is alanine or serine
  Misc_feature (253)..(253): X is glutamine or glutamic acid
  Misc_feature (276)..(276): X is proline or leucine

SEQ ID NO: 36 - protein, 276 aa, Artificial sequence; identical to SEQ ID NO: 30
  synthetic sequence
  Misc_feature (9)..(9): X is histidinem tyrosine, or aspartic acid
  Misc_feature (11)..(11): X is alanine or serine
  Misc_feature (12)..(12): X is methionine or valine
  Misc_feature (24)..(24): X is alanine, serine, or threonine
  Misc_feature (32)..(32): X is glutamie or leucine
  Misc_feature (41)..(41): X is alanine or threonine
  Misc_feature (45)..(45): X is glutamic acid, methionine, lysine, or threonine
  Misc_feature (46)..(46): X is alanine or threonine
  Misc_feature (63)..(63): X is glutamic acid or asparagine
  Misc_feature (66)..(66): X is isoleucine or lysine
  Misc_feature (67)..(67): X is tyrosine, phenylalanie, serine, or cystine
  Misc_feature (70)..(70): X is asparagine or glutamine
  Misc_feature (71)..(71): X is alanine or threonine
  Misc_feature (74)..(74): X is aspartic acid or tyrosine
  Misc_feature (76)..(76): X is glutamic acid or valine
  Misc_feature (77)..(77): X is serine or asparagine
  Misc_feature (80)..(80): X is threonine, asparagine, or isoleucine
  Misc_feature (81)..(81): X is alanine or leucine
  Misc_feature (82)..(82): X is leucine or arginine
  Misc_feature (83)..(83): X is arginine or glycine
  Misc_feature (94)..(94): X is threonine or isoleucine
  Misc_feature (95)..(95): X is leucine or isoleucine
  Misc_feature (97)..(97): X is arginine or serine
  Misc_feature (131)..(131): X is arginine or serine
  Misc_feature (143)..(143): X is S or T
  Misc_feature (147)..(147): X is L or W
  misc_feature (152)..(152): Xaa is E OR V
  misc_feature (156)..(156): Xaa is R, D, L
  misc_feature (158)..(158): Xaa A or T
  Misc_feature (163)..(163): X is leucine, glutamic acid, or threonine
  Misc_feature (177)..(177): X is glutamic acid or aspartic acid
  Misc_feature (178)..(178): X is lysine or threonine
  Misc_feature (180)..(180): X is glutamic acid or glutamine
  Misc_feature (194)..(194): X is isoleucine or valine

SEQ ID NO: 37 - protein, 276 aa, Artificial sequence; identical to SEQ ID NO: 31
  synthetic sequence
  Misc_feature (1)..(1): X is cysteine or glycine
  Misc_feature (6)..(6): X is arginine or lysine
  Misc_feature (9)..(9): X is phenylalanine, tyrosine, serine, or aspartic acid
  Misc_feature (14)..(14): X is arginine or tryptophan
  Misc_feature (21)..(21): X is histidine or arginine
  Misc_feature (24)..(24): X is alanine or serine
  Misc_feature (35)..(35): X is glutamine or arginine
  Misc_feature (49)..(49): X is alanine or arginine
  Misc_feature (66)..(66): X is asparagine, or lysine
  Misc_feature (73)..(73): X is threonine or alanine
  Misc_feature (77)..(77): X is serine or asparagine
  Misc_feature (80)..(80): X is asparagine or lysine
  Misc_feature (90)..(90): X is alanine or aspartic acid
  Misc_feature (91)..(91): X is glycine or arginine
  Misc_feature (94)..(94): X is threonine or isoleucine
  Misc_feature (95)..(95): X is leucine or isoleucine
  Misc_feature (97)..(97): X is tryptophan or arginine
  Misc_feature (99)..(99): X is cysteine, tyrosine, phenylalanine, or serine
  Misc_feature (103)..(103): X is leucine or valine
  Misc_feature (113)..(113): X is tyrosine or histidine
  Misc_feature (114)..(114): X is aspartic acid or asparagine
  Misc_feature (116)..(116): X is tyrosine, phenylalanine, serine, or leucine
  Misc_feature (147)..(147): X is leucine or tryptophan
  Misc_feature (152)..(152): X is glutamic acid, alanine, or threonine
  Misc_feature (156)..(156): X is arginine, leucine, or tryptophan
  Misc_feature (163)..(163): X is leucine or threonine
  Misc_feature (173)..(173): X is glutamic acid or lysine
  Misc_feature (177)..(177): X is glutamic acid or lysine
  Misc_feature (184)..(184): X is histidine or proline
  Misc_feature (194)..(194): X is arginine or valine
  Misc_feature (219)..(219): X is tryptophan or arginine
  Misc_feature (248)..(248): X is valine or methionine
  Misc_feature (253)..(253): X is glutamic acid or lysine
  Misc_feature (261)..(261): X is methionine or valine
  Misc_feature (267)..(267): X is proline or glutamine
  Misc_feature (273)..(273): X is arginine or serine
  Misc_feature (275)..(275): X is proline or glycine

SEQ ID NO: 38 - protein, 284 aa, Artificial sequence; identical to SEQ ID NO: 32
  synthetic sequence
  misc_feature (89)..(89): Xaa is K or E
  misc_feature (107)..(107): Xaa is R or G
  misc_feature (157)..(157): Xaa is R or G
  misc_feature (158)..(158): Xaa is A or V
  misc_feature (255)..(255): Xaa is Q or P
  misc_feature (267)..(267): Xaa is P or S

SEQ ID NO: 39 - protein, 284 aa, Artificial sequence; identical to SEQ ID NO: 33
  synthetic sequence
  misc_feature (7)..(7): Xaa is Y or F
  misc_feature (50)..(50): Xaa is P or Q
  misc_feature (251)..(251): Xaa is S or P
  misc_feature (278)..(278): Xaa is P or L

SEQ ID NO: 40 - protein, 284 aa, Artificial sequence; identical to SEQ ID NO: 34
  synthetic sequence
  misc_feature (13)..(13): Xaa is S or F
  misc_feature (27)..(27): Xaa is Y or H
  misc_feature (31)..(31): Xaa is T, S, or M
  misc_feature (34)..(34): Xaa is L or V
  misc_feature (54)..(54): Xaa is Q or R
  misc_feature (81)..(81): Xaa is P or L
  misc_feature (100)..(100): Xaa is G or D
  misc_feature (104)..(104): Xaa is G or V
  misc_feature (105)..(105): Xaa is S or C
  misc_feature (110)..(110): Xaa is L or I
  misc_feature (159)..(159): Xaa is Y or H
  misc_feature (169)..(169): Xaa is H or R
  misc_feature (171)..(171): Xaa is Y or H
  misc_feature (178)..(178): Xaa is M or T
  misc_feature (185)..(185): Xaa is P or A
  misc_feature (219)..(219): Xaa is R, W, or Q
  misc_feature (258)..(258): Xaa is T or M
  misc_feature (275)..(275): Xaa is K or E

SEQ ID NO: 41 - protein, 275 aa, Homo sapiens
GSHSMRYFFTSVSRPGRGEPRFIAVGYVDDTQFVRFDSDAASQKMEPRAPWIEQEGPEYWDQETRNMKAHSQTDRANLGTLRGYYNQSEDGSHTIQIMYGCDVGPDGRFLRGYRQDAYDGKDYIALNEDLRSWTAADMAAQITKRKWEAVHAAEQRRVYLEGRCVDGLRRYLENGKETLQRTDPPKTHMTHHPISDHEATLRCWALGFYPAEITLTWQRDGEDQTQDTELVETRPAGDGTFQKWAAVVVPSGEEQRYTCHVQHEGLPKPLTLRWE

SEQ ID NO: 42 - protein, 275 aa, Homo sapiens
GSHSMRYFYTSVSRPGRGEPRFISVGYVDDTQFVRFDSDAASPREEPRAPWIEQEGPEYWDRNTQIYKAQAQTDRESLRNLRGYYNQSEAGSHTLQSMYGCDVGPDGRLLRGHDQYAYDGKDYIALNEDLRSWTAADTAAQITQRKWEAAREAEQRRAYLEGECVEWLRRYLENGKDKLERADPPKTHVTHHPISDHEATLRCWALGFYPAEITLTWQRDGEDQTQDTELVETRPAGDRTFQKWAAVVVPSGEEQRYTCHVQHEGLPKPLTLRWE

SEQ ID NO: 43 - protein, 275 aa, Homo sapiens
CSHSMRYFDTAVSRPGRGEPRFISVGYVDDTQFVRFDSDAASPRGEPRAPWVEQEGPEYWDRETQNYKRQAQADRVSLRNLRGYYNQSEDGSHTLQRMYGCDLGPDGRLLRGYDQSAYDGKDYIALNEDLRSWTAADTAAQITQRKLEAARAAEQLRAYLEGTCVEWLRRYLENGKETLQRAEPPKTHVTHHPLSDHEATLRCWALGFYPAEITLTWQRDGEDQTQDTELVETRPAGDGTFQKWAAVVVPSGQEQRYTCHMQHEGLQEPLTLSWE

SEQ ID NO: 44 - protein, 276 aa, Homo sapiens [sequence omitted]

SEQ ID NO: 45 - protein, 274 aa, Mus musculus
GPHSLRYFVTAVSRPGLGEPRFIAVGYVDDTQFVRFDSDADNPRFEPRAPWMEQEGPEYWEEQTQRAKSDEQWFRVSLRTAQRYYNQSKGGSHTFQRMFGCDVGSDWRLLRGYQQFAYDGRDYIALNEDLKTWTAADTAALITRRKWEQAGDAEYYRAYLEGECVEWLRRYLELGNETLLRTDSPKAHVTYHPRSQVDVTLRCWALGFYPADITLTWQLNGEDLTQDMELVETRPAGDGTFQKWAAVVVPLGKEQNYTCHVHHKGLPEPLTLRW

SEQ ID NO: 46 - protein, 275 aa, Artificial sequence
  synthetic sequence
GSHSMRYFFTSVSRPGRGEPRFIAVGYVDDTQFVRFDSDAASQRMEPRAPWIEQEGPEYWDGETRKVKAHSQTHRVDLGTLRGAYNQSEAGSHTVQRMYGCDVGSDWRFLRGYHQYAYDGKDYIALKEDLRSWTAADMAAQTTKHKWEAAHVAEQLRAYLEGTCVEWLRRYLENGKETLQRTDAPKTHMTHHAVSDHEATLRCWALSFYPAEITLTWQRDGEDQTQDTELVETRPCGDGTFQKWAAVVVPSGQEQRYTCHVQHEGLPKPLTLRWE

SEQ ID NO: 47 - protein, 275 aa, Artificial sequence
  synthetic sequence
GSHSMRYFFTSVSRPGRGEPRFIAVGYVDDTQFVRFDSDAASQRMEPRAPWIEQEGPEYWDGETRKVKAHSQTHRVDLGTLRGCYNQSEAGSHTVQRMYGCDVGSDWRFLRGYHQYAYDGKDYIALKEDLRSWTAADMCAQTTKHKWEAAHVAEQLRAYLEGTCVEWLRRYLENGKETLQRTDAPKTHMTHHAVSDHEATLRCWALSFYPAEITLTWQRDGEDQTQDTELVETRPCGDGTFQKWAAVVVPSGQEQRYTCHVQHEGLPKPLTLRWE

SEQ ID NO: 48 - protein, 276 aa, Artificial sequence
  synthetic sequence
GSHSMRYFFTSVSRPGRGEPRFIAVGYVDDTQFVRFDSDAASQRMEPRAPWIEQEGPEYWDGETRKVKAHSQTHRVDLGTLRGAYNQSEAGSHTVQRMYGCDVGSDWRFLRGYHQYAYDGKDYIALKEDLRSWTAADMAAQTTKHKWEAAHVAEQLRAYLEGTCVEWLRRYLENGKETLQRTDAPKTHMTHHAVSDHEATLRCWALSFYPAEITLTWQRDGEDQTQDTELVETRPCGDGTFQKWAAVVVPSGQEQRYTCHVQHEGLPKPLTLRWEP

SEQ ID NO: 49 - protein, 276 aa, Homo sapiens
GSHSMRYFYTSVSRPGRGEPRFIAVGYVDDTQFVRFDSDAASQRMEPRAPWIEQEGPEYWDQETRNVKAQSQTDRVDLGTLRGYYNQSEDGSHTIQIMYGCDVGPDGRFLRGYRQDAYDGKDYIALNEDLRSWTAADMAAQITKRKWEAAHAAEQQRAYLEGRCVEWLRRYLENGKETLQRTDPPKTHMTHHPISDHEATLRCWALGFYPAEITLTWQRDGEDQTQDTELVETRPAGDGTFQKWAAVVVPSGEEQRYTCHVQHEGLPKPLTLRWEL

SEQ ID NO: 50 - protein, 276 aa, Homo sapiens
GSHSMRYFSTSVSRPGRGEPRFIAVGYVDDTQFVRFDSDAASQRMEPRAPWIEQEGPEYWDEETGKVKAHSQTDRENLRIALRYYNQSEAGSHTLQMMFGCDVGSDGRFLRGYHQYAYDGKDYIALKEDLRSWTAADMAAQITKRKWEAAHVAEQQRAYLEGTCVDGLRRYLENGKETLQRTDPPKTHMTHHPISDHEATLRCWALGFYPAEITLTWQRDGEDQTQDTELVETRPAGDGTFQKWAAVVVPSGEEQRYTCHVQHEGLPKPLTLRWEP

SEQ ID NO: 51 - protein, 276 aa, Homo sapiens
GSHSMRYFTTSVSRPGRGEPRFIAVGYVDDTQFVRFDSDAASQRMEPRAPWIEQEGPEYWDRNTRNVKAHSQIDRVDLGTLRGYYNQSEAGSHTIQMMYGCDVGSDGRFLRGYQQDAYDGKDYIALNEDLRSWTAADMAAQITQRKWEAARVAEQLRAYLEGTCVEWLRRYLENGKETLQRTDPPKTHMTHHAVSDHEATLRCWALSFYPAEITLTWQRDGEDQTQDTELVETRPAGDGTFQKWASVVVPSGQEQRYTCHVQHEGLPKPLTLRWEP

SEQ ID NO: 52 - protein, 219 aa, Artificial sequence
  synthetic sequence
  misc_feature (8)..(8): any amino acid other than aspartic acid
FTVTVPKXLYVVEYGSNMTIECKFPVEKQLDLAALIVYWEMEDKNIIQFVHGEEDLKVQHSSYRQRARLLKDQLSLGNAALQITDVKLQDAGVYRCMISYGGADYKRITVKVNAPYNKINQRILVVDPVTSEHELTCQAEGYPKAEVIWTSSDHQVLSGKTTTTNSKREEKLFNVTSTLRINTTTNEIFYCTFRRLDPEENHTAELVIPGNILNVSIKI

SEQ ID NO: 53 - protein, 219 aa, Artificial sequence
  synthetic sequence
  misc_feature (36)..(36): any amino acid other than isoleucine
FTVTVPKDLYVVEYGSNMTIECKFPVEKQLDLAALXVYWEMEDKNIIQFVHGEEDLKVQHSSYRQRARLLKDQLSLGNAALQITDVKLQDAGVYRCMISYGGADYKRITVKVNAPYNKINQRILVVDPVTSEHELTCQAEGYPKAEVIWTSSDHQVLSGKTTTTNSKREEKLFNVTSTLRINTTTNEIFYCTFRRLDPEENHTAELVIPGNILNVSIKI

SEQ ID NO: 54 - protein, 219 aa, Artificial sequence
  synthetic sequence
  misc_feature (54)..(54): any amino acid other than glutamine
FTVTVPKDLYVVEYGSNMTIECKFPVEKQLDLAALIVYWEMEDKNIIQFVHGEXDLKVQHSSYRQRARLLKDQLSLGNAALQITDVKLQDAGVYRCMISYGGADYKRITVKVNAPYNKINQRILVVDPVTSEHELTCQAEGYPKAEVIWTSSDHQVLSGKTTTTNSKREEKLFNVTSTLRINTTTNEIFYCTFRRLDPEENHTAELVIPGNILNVSIKI

SEQ ID NO: 55 - protein, 208 aa, Artificial sequence
  synthetic sequence
  misc_feature (19)..(19): any amino acid other than asparagine
VIHVTKEVKEVATLSCGHXVSVEELAQTRIYWQKEKKMVLTMMSGDMNIWPEYKNRTIFDITNNLSIVILALRPSDEGTYECVVLKYEKDAFKREHLAEVTLSVKADFPTPSISDFEIPTSNIRRIICSTSGGFPEPHLSWLENGEELNAINTTVSQDPETELYAVSSKLDFNMTTNHSFMCLIKYGHLRVNQTFNWNTTKQEHFPDN

SEQ ID NO: 56 - protein, 208 aa, Artificial sequence
  synthetic sequence
  misc_feature (63)..(63): any amino acid other than asparagine
VIHVTKEVKEVATLSCGHNVSVEELAQTRIYWQKEKKMVLTMMSGDMNIWPEYKNRTIFDITXNLSIVILALRPSDEGTYECVVLKYEKDAFKREHLAEVTLSVKADFPTPSISDFEIPTSNIRRIICSTSGGFPEPHLSWLENGEELNAINTTVSQDPETELYAVSSKLDFNMTTNHSFMCLIKYGHLRVNQTFNWNTTKQEHFPDN

SEQ ID NO: 57 - protein, 208 aa, Artificial sequence
  synthetic sequence
  misc_feature (67)..(67): any amino acid other than isoleucine
VIHVTKEVKEVATLSCGHNVSVEELAQTRIYWQKEKKMVLTMMSGDMNIWPEYKNRTIFDITNNLSXVILALRPSDEGTYECVVLKYEKDAFKREHLAEVTLSVKADFPTPSISDFEIPTSNIRRIICSTSGGFPEPHLSWLENGEELNAINTTVSQDPETELYAVSSKLDFNMTTNHSFMCLIKYGHLRVNQTFNWNTTKQEHFPDN

SEQ ID NO: 58 - protein, 208 aa, Artificial sequence
  synthetic sequence
  misc_feature (86)..(86): any amino acid other than lysine
VIHVTKEVKEVATLSCGHNVSVEELAQTRIYWQKEKKMVLTMMSGDMNIWPEYKNRTIFDITNNLSIVILALRPSDEGTYECVVLXYEKDAFKREHLAEVTLSVKADFPTPSISDFEIPTSNIRRIICSTSGGFPEPHLSWLENGEELNAINTTVSQDPETELYAVSSKLDFNMTTNHSFMCLIKYGHLRVNQTFNWNTTKQEHFPDN

SEQ ID NO: 59 - protein, 5 aa, Artificial sequence
  synthetic sequence
  misc_feature (4)..(4): any amino acid other than proline
VPGXG

SEQ ID NO: 60 - protein, 208 aa, Artificial sequence
  synthetic sequence
  misc_feature (157)..(157): any amino acid other than glutamine
VIHVTKEVKEVATLSCGHNVSVEELAQTRIYWQKEKKMVLTMMSGDMNIWPEYKNRTIFDITNNLSIVILALRPSDEGTYECVVLKYEKDAFKREHLAEVTLSVKADFPTPSISDFEIPTSNIRRIICSTSGGFPEPHLSWLENGEELNAINTTVSXDPETELYAVSSKLDFNMTTNHSFMCLIKYGHLRVNQTFNWNTTKQEHFPDN

SEQ ID NO: 61 - protein, 208 aa, Artificial sequence
  synthetic sequence
  misc_feature (158)..(158): any amino acid other than aspartic acid
VIHVTKEVKEVATLSCGHNVSVEELAQTRIYWQKEKKMVLTMMSGDMNIWPEYKNRTIFDITNNLSIVILALRPSDEGTYECVVLKYEKDAFKREHLAEVTLSVKADFPTPSISDFEIPTSNIRRIICSTSGGFPEPHLSWLENGEELNAINTTVSQXPETELYAVSSKLDFNMTTNHSFMCLIKYGHLRVNQTFNWNTTKQEHFPDN

SEQ ID NO: 62 - protein, 208 aa, Artificial sequence
  synthetic sequence
  misc_feature (25)..(25): any amino acid other than leucine
VIHVTKEVKEVATLSCGHNVSVEEXAQTRIYWQKEKKMVLTMMSGDMNIWPEYKNRTIFDITNNLSIVILALRPSDEGTYECVVLKYEKDAFKREHLAEVTLSVKADFPTPSISDFEIPTSNIRRIICSTSGGFPEPHLSWLENGEELNAINTTVSQDPETELYAVSSKLDFNMTTNHSFMCLIKYGHLRVNQTFNWNTTKQEHFPDN

SEQ ID NO: 63 - protein, 208 aa, Artificial sequence
  synthetic sequence
  misc_feature (31)..(31): any amino acid other than tyrosine
VIHVTKEVKEVATLSCGHNVSVEELAQTRIXWQKEKKMVLTMMSGDMNIWPEYKNRTIFDITNNLSIVILALRPSDEGTYECVVLKYEKDAFKREHLAEVTLSVKADFPTPSISDFEIPTSNIRRIICSTSGGFPEPHLSWLENGEELNAINTTVSQDPETELYAVSSKLDFNMTTNHSFMCLIKYGHLRVNQTFNWNTTKQEHFPDN

SEQ ID NO: 64 - protein, 208 aa, Artificial sequence
  synthetic sequence
  misc_feature (33)..(33): any amino acid other than glutamine
VIHVTKEVKEVATLSCGHNVSVEELAQTRIYWXKEKKMVLTMMSGDMNIWPEYKNRTIFDITNNLSIVILALRPSDEGTYECVVLKYEKDAFKREHLAEVTLSVKADFPTPSISDFEIPTSNIRRIICSTSGGFPEPHLSWLENGEELNAINTTVSQDPETELYAVSSKLDFNMTTNHSFMCLIKYGHLRVNQTFNWNTTKQEHFPDN

SEQ ID NO: 65 - protein, 208 aa, Artificial sequence
  synthetic sequence
  misc_feature (38)..(38): any amino acid other than methionine
VIHVTKEVKEVATLSCGHNVSVEELAQTRIYWQKEKKXVLTMMSGDMNIWPEYKNRTIFDITNNLSIVILALRPSDEGTYECVVLKYEKDAFKREHLAEVTLSVKADFPTPSISDFEIPTSNIRRIICSTSGGFPEPHLSWLENGEELNAINTTVSQDPETELYAVSSKLDFNMTTNHSFMCLIKYGHLRVNQTFNWNTTKQEHFPDN

SEQ ID NO: 66 - protein, 208 aa, Artificial sequence
  synthetic sequence
  misc_feature (39)..(39): any amino acid other than valine
VIHVTKEVKEVATLSCGHNVSVEELAQTRIYWQKEKKMXLTMMSGDMNIWPEYKNRTIFDITNNLSIVILALRPSDEGTYECVVLKYEKDAFKREHLAEVTLSVKADFPTPSISDFEIPTSNIRRIICSTSGGFPEPHLSWLENGEELNAINTTVSQDPETELYAVSSKLDFNMTTNHSFMCLIKYGHLRVNQTFNWNTTKQEHFPDN

SEQ ID NO: 67 - protein, 208 aa, Artificial sequence
  synthetic sequence
  misc_feature (49)..(49): any amino acid other than isoleucine
VIHVTKEVKEVATLSCGHNVSVEELAQTRIYWQKEKKMVLTMMSGDMNXWPEYKNRTIFDITNNLSIVILALRPSDEGTYECVVLKYEKDAFKREHLAEVTLSVKADFPTPSISDFEIPTSNIRRIICSTSGGFPEPHLSWLENGEELNAINTTVSQDPETELYAVSSKLDFNMTTNHSFMCLIKYGHLRVNQTFNWNTTKQEHFPDN

SEQ ID NO: 68 - protein, 208 aa, Artificial sequence
  synthetic sequence
  misc_feature (53)..(53): any amino acid other than tyrosine
VIHVTKEVKEVATLSCGHNVSVEELAQTRIYWQKEKKMVLTMMSGDMNIWPEXKNRTIFDITNNLSIVILALRPSDEGTYECVVLKYEKDAFKREHLAEVTLSVKADFPTPSISDFEIPTSNIRRIICSTSGGFPEPHLSWLENGEELNAINTTVSQDPETELYAVSSKLDFNMTTNHSFMCLIKYGHLRVNQTFNWNTTKQEHFPDN

SEQ ID NO: 69 - protein, 208 aa, Artificial sequence
  synthetic sequence
  misc_feature (60)..(60): any amino acid other than aspartic acid
VIHVTKEVKEVATLSCGHNVSVEELAQTRIYWQKEKKMVLTMMSGDMNIWPEYKNRTIFXITNNLSIVILALRPSDEGTYECVVLKYEKDAFKREHLAEVTLSVKADFPTPSISDFEIPTSNIRRIICSTSGGFPEPHLSWLENGEELNAINTTVSQDPETELYAVSSKLDFNMTTNHSFMCLIKYGHLRVNQTFNWNTTKQEHFPDN

SEQ ID NO: 70 - protein, 208 aa, Artificial sequence
  synthetic sequence
  misc_feature (108)..(108): any amino acid other than phenylalanine
VIHVTKEVKEVATLSCGHNVSVEELAQTRIYWQKEKKMVLTMMSGDMNIWPEYKNRTIFDITNNLSIVILALRPSDEGTYECVVLKYEKDAFKREHLAEVTLSVKADXPTPSISDFEIPTSNIRRIICSTSGGFPEPHLSWLENGEELNAINTTVSQDPETELYAVSSKLDFNMTTNHSFMCLIKYGHLRVNQTFNWNTTKQEHFPDN

SEQ ID NO: 71 - protein, 208 aa, Artificial sequence
  synthetic sequence
  misc_feature (156)..(156): any amino acid other than serine
VIHVTKEVKEVATLSCGHNVSVEELAQTRIYWQKEKKMVLTMMSGDMNIWPEYKNRTIFDITNNLSIVILALRPSDEGTYECVVLKYEKDAFKREHLAEVTLSVKADFPTPSISDFEIPTSNIRRIICSTSGGFPEPHLSWLENGEELNAINTTVXQDPETELYAVSSKLDFNMTTNHSFMCLIKYGHLRVNQTFNWNTTKQEHFPDN

SEQ ID NO: 72 - protein, 208 aa, Artificial sequence
  synthetic sequence
  misc_feature (111)..(111): any amino acid other than proline
VIHVTKEVKEVATLSCGHNVSVEELAQTRIYWQKEKKMVLTMMSGDMNIWPEYKNRTIFDITNNLSIVILALRPSDEGTYECVVLKYEKDAFKREHLAEVTLSVKADFPTXSISDFEIPTSNIRRIICSTSGGFPEPHLSWLENGEELNAINTTVSQDPETELYAVSSKLDFNMTTNHSFMCLIKYGHLRVNQTFNWNTTKQEHFPDN

SEQ ID NO: 73 - protein, 224 aa, Artificial sequence
  synthetic sequence
  misc_feature (61)..(61): any amino acid other than asparagine
APLKIQAYFNETADLPCQFANSQNQSLSELVVFWQDQENLVLNEVYLGKEKFDSVHSKYMXRTSFDSDSWTLRLHNLQIKDKGLYQCIIHHKKPTGMIRIHQMNSELSVLANFSQPEIVPISNITENVYINLTCSSIHGYPEPKKMSVLLRTKNSTIEYDGIMQKSQDNVTELYDVSISLSVSFPDVTSNMTIFCILETDKTRLLSSPFSIELEDPQPPPDHIP

SEQ ID NO: 74 - protein, 224 aa, Artificial sequence
  synthetic sequence
  misc_feature (66)..(66): any amino acid other than aspartic acid
APLKIQAYFNETADLPCQFANSQNQSLSELVVFWQDQENLVLNEVYLGKEKFDSVHSKYMNRTSFXSDSWTLRLHNLQIKDKGLYQCIIHHKKPTGMIRIHQMNSELSVLANFSQPEIVPISNITENVYINLTCSSIHGYPEPKKMSVLLRTKNSTIEYDGIMQKSQDNVTELYDVSISLSVSFPDVTSNMTIFCILETDKTRLLSSPFSIELEDPQPPPDHIP

SEQ ID NO: 75 - protein, 224 aa, Artificial sequence
  synthetic sequence
  misc_feature (70)..(70): any amino acid other than tryptophan
APLKIQAYFNETADLPCQFANSQNQSLSELVVFWQDQENLVLNEVYLGKEKFDSVHSKYMNRTSFDSDSXTLRLHNLQIKDKGLYQCIIHHKKPTGMIRIHQMNSELSVLANFSQPEIVPISNITENVYINLTCSSIHGYPEPKKMSVLLRTKNSTIEYDGIMQKSQDNVTELYDVSISLSVSFPDVTSNMTIFCILETDKTRLLSSPFSIELEDPQPPPDHIP

SEQ ID NO: 76 - protein, 224 aa, Artificial sequence
  synthetic sequence
  misc_feature (91)..(91): any amino acid other than histidine
APLKIQAYFNETADLPCQFANSQNQSLSELVVFWQDQENLVLNEVYLGKEKFDSVHSKYMNRTSFDSDSWTLRLHNLQIKDKGLYQCIIHXKKPTGMIRIHQMNSELSVLANFSQPEIVPISNITENVYINLTCSSIHGYPEPKKMSVLLRTKNSTIEYDGIMQKSQDNVTELYDVSISLSVSFPDVTSNMTIFCILETDKTRLLSSPFSIELEDPQPPPDHIP

SEQ ID NO: 77 - protein, 110 aa, Artificial sequence
  synthetic sequence
  misc_feature (61)..(61): any amino acid other than asparagine
APLKIQAYFNETADLPCQFANSQNQSLSELVVFWQDQENLVLNEVYLGKEKFDSVHSKYMXRTSFDSDSWTLRLHNLQIKDKGLYQCIIHHKKPTGMIRIHQMNSELSVL

SEQ ID NO: 78 - protein, 110 aa, Artificial sequence
  synthetic sequence
  misc_feature (66)..(66): any amino acid other than aspartic acid
APLKIQAYFNETADLPCQFANSQNQSLSELVVFWQDQENLVLNEVYLGKEKFDSVHSKYMNRTSFXSDSWTLRLHNLQIKDKGLYQCIIHHKKPTGMIRIHQMNSELSVL

SEQ ID NO: 79 - protein, 110 aa, Artificial sequence
  synthetic sequence
  misc_feature (70)..(70): any amino acid other than tryptophan
APLKIQAYFNETADLPCQFANSQNQSLSELVVFWQDQENLVLNEVYLGKEKFDSVHSKYMNRTSFDSDSXTLRLHNLQIKDKGLYQCIIHHKKPTGMIRIHQMNSELSVL

SEQ ID NO: 80 - protein, 110 aa, Artificial sequence
  synthetic sequence
  misc_feature (91)..(91): any amino acid other than histidine
APLKIQAYFNETADLPCQFANSQNQSLSELVVFWQDQENLVLNEVYLGKEKFDSVHSKYMNRTSFDSDSWTLRLHNLQIKDKGLYQCIIHXKKPTGMIRIHQMNSELSVL

SEQ ID NO: 81 - protein, 224 aa, Artificial sequence
  synthetic sequence
  misc_feature (41)..(41): any amino acid other than valine
APLKIQAYFNETADLPCQFANSQNQSLSELVVFWQDQENLXLNEVYLGKEKFDSVHSKYMNRTSFDSDSWTLRLHNLQIKDKGLYQCIIHHKKPTGMIRIHQMNSELSVLANFSQPEIVPISNITENVYINLTCSSIHGYPEPKKMSVLLRTKNSTIEYDGIMQKSQDNVTELYDVSISLSVSFPDVTSNMTIFCILETDKTRLLSSPFSIELEDPQPPPDHIP

SEQ ID NO: 82 - protein, 110 aa, Artificial sequence
  synthetic sequence
  misc_feature (41)..(41): any amino acid other than valine
APLKIQAYFNETADLPCQFANSQNQSLSELVVFWQDQENLXLNEVYLGKEKFDSVHSKYMNRTSFDSDSWTLRLHNLQIKDKGLYQCIIHHKKPTGMIRIHQMNSELSVL

SEQ ID NO: 83 - protein, 224 aa, Artificial sequence
  synthetic sequence
  misc_feature (35)..(35): any amino acid other than glutamine
APLKIQAYFNETADLPCQFANSQNQSLSELVVFWXDQENLVLNEVYLGKEKFDSVHSKYMNRTSFDSDSWTLRLHNLQIKDKGLYQCIIHHKKPTGMIRIHQMNSELSVLANFSQPEIVPISNITENVYINLTCSSIHGYPEPKKMSVLLRTKNSTIEYDGIMQKSQDNVTELYDVSISLSVSFPDVTSNMTIFCILETDKTRLLSSPFSIELEDPQPPPDHIP

SEQ ID NO: 84 - protein, 110 aa, Artificial sequence
  synthetic sequence
  misc_feature (35)..(35): any amino acid other than glutamine
APLKIQAYFNETADLPCQFANSQNQSLSELVVFWXDQENLVLNEVYLGKEKFDSVHSKYMNRTSFDSDSWTLRLHNLQIKDKGLYQCIIHHKKPTGMIRIHQMNSELSVL

SEQ ID NO: 85 - protein, 224 aa, Artificial sequence
  synthetic sequence
  misc_feature (33)..(33): any amino acid other than phenylalanine
APLKIQAYFNETADLPCQFANSQNQSLSELVVXWQDQENLVLNEVYLGKEKFDSVHSKYMNRTSFDSDSWTLRLHNLQIKDKGLYQCIIHHKKPTGMIRIHQMNSELSVLANFSQPEIVPISNITENVYINLTCSSIHGYPEPKKMSVLLRTKNSTIEYDGIMQKSQDNVTELYDVSISLSVSFPDVTSNMTIFCILETDKTRLLSSPFSIELEDPQPPPDHIP

SEQ ID NO: 86 - protein, 110 aa, Artificial sequence
  synthetic sequence
  misc_feature (33)..(33): any amino acid other than phenylalanine
APLKIQAYFNETADLPCQFANSQNQSLSELVVXWQDQENLVLNEVYLGKEKFDSVHSKYMNRTSFDSDSWTLRLHNLQIKDKGLYQCIIHHKKPTGMIRIHQMNSELSVL

SEQ ID NO: 87 - protein, 224 aa, Artificial sequence
  synthetic sequence
  misc_feature (72)..(72): any amino acid other than leucine
APLKIQAYFNETADLPCQFANSQNQSLSELVVFWQDQENLVLNEVYLGKEKFDSVHSKYMNRTSFDSDSWTXRLHNLQIKDKGLYQCIIHHKKPTGMIRIHQMNSELSVLANFSQPEIVPISNITENVYINLTCSSIHGYPEPKKMSVLLRTKNSTIEYDGIMQKSQDNVTELYDVSISLSVSFPDVTSNMTIFCILETDKTRLLSSPFSIELEDPQPPPDHIP

SEQ ID NO: 88 - protein, 110 aa, Artificial sequence
  synthetic sequence
  misc_feature (72)..(72): any amino acid other than leucine
APLKIQAYFNETADLPCQFANSQNQSLSELVVFWQDQENLVLNEVYLGKEKFDSVHSKYMNRTSFDSDSWTXRLHNLQIKDKGLYQCIIHHKKPTGMIRIHQMNSELSVL

SEQ ID NO: 89 - protein, 224 aa, Artificial sequence
  synthetic sequence
  misc_feature (59)..(59): any amino acid other than tyrosine
APLKIQAYFNETADLPCQFANSQNQSLSELVVFWQDQENLVLNEVYLGKEKFDSVHSKXMNRTSFDSDSWTLRLHNLQIKDKGLYQCIIHHKKPTGMIRIHQMNSELSVLANFSQPEIVPISNITENVYINLTCSSIHGYPEPKKMSVLLRTKNSTIEYDGIMQKSQDNVTELYDVSISLSVSFPDVTSNMTIFCILETDKTRLLSSPFSIELEDPQPPPDHIP

SEQ ID NO: 90 - protein, 110 aa, Artificial sequence
  synthetic sequence
  misc_feature (59)..(59): any amino acid other than tyrosine
APLKIQAYFNETADLPCQFANSQNQSLSELVVFWQDQENLVLNEVYLGKEKFDSVHSKXMNRTSFDSDSWTLRLHNLQIKDKGLYQCIIHHKKPTGMIRIHQMNSELSVL

SEQ ID NO: 91 - protein, 224 aa, Artificial sequence
  synthetic sequence
  misc_feature (61)..(61): any amino acid other than asparagine
  misc_feature (91)..(91): any amino acid other than histidine
APLKIQAYFNETADLPCQFANSQNQSLSELVVFWQDQENLVLNEVYLGKEKFDSVHSKYMXRTSFDSDSWTLRLHNLQIKDKGLYQCIIHXKKPTGMIRIHQMNSELSVLANFSQPEIVPISNITENVYINLTCSSIHGYPEPKKMSVLLRTKNSTIEYDGIMQKSQDNVTELYDVSISLSVSFPDVTSNMTIFCILETDKTRLLSSPFSIELEDPQPPPDHIP

SEQ ID NO: 92 - protein, 110 aa, Artificial sequence
  synthetic sequence
  misc_feature (61)..(61): any amino acid other than asparagine
  misc_feature (91)..(91): any amino acid other than histidine
APLKIQAYFNETADLPCQFANSQNQSLSELVVFWQDQENLVLNEVYLGKEKFDSVHSKYMXRTSFDSDSWTLRLHNLQIKDKGLYQCIIHXKKPTGMIRIHQMNSELSVL

SEQ ID NO: 93 - protein, 224 aa, Artificial sequence
  synthetic sequence
  misc_feature (66)..(66): any amino acid other than aspartic acid
  misc_feature (91)..(91): any amino acid other than histidine
APLKIQAYFNETADLPCQFANSQNQSLSELVVFWQDQENLVLNEVYLGKEKFDSVHSKYMNRTSFXSDSWTLRLHNLQIKDKGLYQCIIHXKKPTGMIRIHQMNSELSVLANFSQPEIVPISNITENVYINLTCSSIHGYPEPKKMSVLLRTKNSTIEYDGIMQKSQDNVTELYDVSISLSVSFPDVTSNMTIFCILETDKTRLLSSPFSIELEDPQPPPDHIP

SEQ ID NO: 94 - protein, 110 aa, Artificial sequence
  synthetic sequence
  misc_feature (66)..(66): any amino acid other than asparagine
  misc_feature (91)..(91): Xaa can be any amino acid other than His
APLKIQAYFNETADLPCQFANSQNQSLSELVVFWQDQENLVLNEVYLGKEKFDSVHSKYMNRTSFXSDSWTLRLHNLQIKDKGLYQCIIHXKKPTGMIRIHQMNSELSVL

SEQ ID NO: 95 - protein, 224 aa, Artificial sequence
  synthetic sequence
  Misc_feature (61)..(61): any amino acid other than asparagine
  Misc_feature (66)..(66): any amino acid other than aspartic acid
  Misc_feature (91)..(91): any amino acid other than histidine
APLKIQAYFNETADLPCQFANSQNQSLSELVVFWQDQENLVLNEVYLGKEKFDSVHSKYMXRTSFXSDSWTLRLHNLQIKDKGLYQCIIHXKKPTGMIRIHQMNSELSVLANFSQPEIVPISNITENVYINLTCSSIHGYPEPKKMSVLLRTKNSTIEYDGIMQKSQDNVTELYDVSISLSVSFPDVTSNMTIFCILETDKTRLLSSPFSIELEDPQPPPDHIP

SEQ ID NO: 96 - protein, 110 aa, Artificial sequence
  synthetic sequence
  Misc_feature (61)..(61): any amino acid other than asparagine
  Misc_feature (66)..(66): any amino acid other than aspartic acid
  Misc_feature (91)..(91): any amino acid other than histidine
APLKIQAYFNETADLPCQFANSQNQSLSELVVFWQDQENLVLNEVYLGKEKFDSVHSKYMXRTSFXSDSWTLRLHNLQIKDKGLYQCIIHXKKPTGMIRIHQMNSELSVL

SEQ ID NO: 97 - protein, 174 aa, Artificial sequence
  synthetic sequence
  misc_feature (47)..(47): any amino acid other than lysine
PAGLLDLRQGMFAQLVAQNVLLIDGPLSWYSDPGLAGVSLTGGLSYXEDTKELVVAKAGVYYVFFQLELRRVVAGEGSGSVSLALHLQPLRSAAGAAALALTVDLPPASSEARNSAFGFQGRLLHLSAGQRLGVHLHTEARARHAWQLTQGATVLGLFRVTPEIPAGLPSPRSE

SEQ ID NO: 98 - protein, 174 aa, Artificial sequence
  synthetic sequence
  misc_feature (147)..(147): any amino acid other than glutamine
PAGLLDLRQGMFAQLVAQNVLLIDGPLSWYSDPGLAGVSLTGGLSYKEDTKELVVAKAGVYYVFFQLELRRVVAGEGSGSVSLALHLQPLRSAAGAAALALTVDLPPASSEARNSAFGFQGRLLHLSAGQRLGVHLHTEARARHAWXLTQGATVLGLFRVTPEIPAGLPSPRSE

SEQ ID NO: 99 - protein, 174 aa, Artificial sequence
  synthetic sequence
  misc_feature (11)..(11): any amino acid other than methionine
PAGLLDLRQGXFAQLVAQNVLLIDGPLSWYSDPGLAGVSLTGGLSYKEDTKELVVAKAGVYYVFFQLELRRVVAGEGSGSVSLALHLQPLRSAAGAAALALTVDLPPASSEARNSAFGFQGRLLHLSAGQRLGVHLHTEARARHAWQLTQGATVLGLFRVTPEIPAGLPSPRSE

SEQ ID NO: 100 - protein, 174 aa, Artificial sequence
  synthetic sequence
  misc_feature (12)..(12): any amino acid other than phenylalanine
PAGLLDLRQGMXAQLVAQNVLLIDGPLSWYSDPGLAGVSLTGGLSYKEDTKELVVAKAGVYYVFFQLELRRVVAGEGSGSVSLALHLQPLRSAAGAAALALTVDLPPASSEARNSAFGFQGRLLHLSAGQRLGVHLHTEARARHAWQLTQGATVLGLFRVTPEIPAGLPSPRSE

SEQ ID NO: 101 - protein, 174 aa, Artificial sequence
  synthetic sequence
  misc_feature (14)..(14): any amino acid other than glutamine
PAGLLDLRQGMFAXLVAQNVLLIDGPLSWYSDPGLAGVSLTGGLSYKEDTKELVVAKAGVYYVFFQLELRRVVAGEGSGSVSLALHLQPLRSAAGAAALALTVDLPPASSEARNSAFGFQGRLLHLSAGQRLGVHLHTEARARHAWQLTQGATVLGLFRVTPEIPAGLPSPRSE

SEQ ID NO: 102 - protein, 174 aa, Artificial sequence
  synthetic sequence
  misc_feature (15)..(15): any amino acid other than leucine
PAGLLDLRQGMFAQXVAQNVLLIDGPLSWYSDPGLAGVSLTGGLSYKEDTKELVVAKAGVYYVFFQLELRRVVAGEGSGSVSLALHLQPLRSAAGAAALALTVDLPPASSEARNSAFGFQGRLLHLSAGQRLGVHLHTEARARHAWQLTQGATVLGLFRVTPEIPAGLPSPRSE

SEQ ID NO: 103 - protein, 174 aa, Artificial sequence
  synthetic sequence
  misc_feature (16)..(16): any amino acid other than valine
PAGLLDLRQGMFAQLXAQNVLLIDGPLSWYSDPGLAGVSLTGGLSYKEDTKELVVAKAGVYYVFFQLELRRVVAGEGSGSVSLALHLQPLRSAAGAAALALTVDLPPASSEARNSAFGFQGRLLHLSAGQRLGVHLHTEARARHAWQLTQGATVLGLFRVTPEIPAGLPSPRSE

SEQ ID NO: 104 - protein, 174 aa, Artificial sequence
  synthetic sequence
  misc_feature (18)..(18): any amino acid other than glutamine
PAGLLDLRQGMFAQLVAXNVLLIDGPLSWYSDPGLAGVSLTGGLSYKEDTKELVVAKAGVYYVFFQLELRRVVAGEGSGSVSLALHLQPLRSAAGAAALALTVDLPPASSEARNSAFGFQGRLLHLSAGQRLGVHLHTEARARHAWQLTQGATVLGLFRVTPEIPAGLPSPRSE

SEQ ID NO: 105 - protein, 174 aa, Artificial sequence
  synthetic sequence
  misc_feature (19)..(19): any amino acid other than asparagined
PAGLLDLRQGMFAQLVAQXVLLIDGPLSWYSDPGLAGVSLTGGLSYKEDTKELVVAKAGVYYVFFQLELRRVVAGEGSGSVSLALHLQPLRSAAGAAALALTVDLPPASSEARNSAFGFQGRLLHLSAGQRLGVHLHTEARARHAWQLTQGATVLGLFRVTPEIPAGLPSPRSE

SEQ ID NO: 106 - protein, 174 aa, Artificial sequence
  synthetic sequence
  misc_feature (20)..(20): any amino acid other than valine
PAGLLDLRQGMFAQLVAQNXLLIDGPLSWYSDPGLAGVSLTGGLSYKEDTKELVVAKAGVYYVFFQLELRRVVAGEGSGSVSLALHLQPLRSAAGAAALALTVDLPPASSEARNSAFGFQGRLLHLSAGQRLGVHLHTEARARHAWQLTQGATVLGLFRVTPEIPAGLPSPRSE

SEQ ID NO: 107 - protein, 174 aa, Artificial sequence
  synthetic sequence
  misc_feature (21)..(21): any amino acid other than leucine
PAGLLDLRQGMFAQLVAQNVXLIDGPLSWYSDPGLAGVSLTGGLSYKEDTKELVVAKAGVYYVFFQLELRRVVAGEGSGSVSLALHLQPLRSAAGAAALALTVDLPPASSEARNSAFGFQGRLLHLSAGQRLGVHLHTEARARHAWQLTQGATVLGLFRVTPEIPAGLPSPRSE

SEQ ID NO: 108 - protein, 174 aa, Artificial sequence
  synthetic sequence
  misc_feature (22)..(22): any amino acid other than leucine
PAGLLDLRQGMFAQLVAQNVLXIDGPLSWYSDPGLAGVSLTGGLSYKEDTKELVVAKAGVYYVFFQLELRRVVAGEGSGSVSLALHLQPLRSAAGAAALALTVDLPPASSEARNSAFGFQGRLLHLSAGQRLGVHLHTEARARHAWQLTQGATVLGLFRVTPEIPAGLPSPRSE

SEQ ID NO: 109 - protein, 174 aa, Artificial sequence
  synthetic sequence
  misc_feature (23)..(23): any amino acid other than isoleucine
PAGLLDLRQGMFAQLVAQNVLLXDGPLSWYSDPGLAGVSLTGGLSYKEDTKELVVAKAGVYYVFFQLELRRVVAGEGSGSVSLALHLQPLRSAAGAAALALTVDLPPASSEARNSAFGFQGRLLHLSAGQRLGVHLHTEARARHAWQLTQGATVLGLFRVTPEIPAGLPSPRSE

SEQ ID NO: 110 - protein, 174 aa, Artificial sequence
  synthetic sequence
  misc_feature (24)..(24): any amino acid other than aspartic acid
PAGLLDLRQGMFAQLVAQNVLLIXGPLSWYSDPGLAGVSLTGGLSYKEDTKELVVAKAGVYYVFFQLELRRVVAGEGSGSVSLALHLQPLRSAAGAAALALTVDLPPASSEARNSAFGFQGRLLHLSAGQRLGVHLHTEARARHAWQLTQGATVLGLFRVTPEIPAGLPSPRSE

SEQ ID NO: 111 - protein, 174 aa, Artificial sequence
  synthetic sequence
  misc_feature (25)..(25): any amino acid other than glycine
PAGLLDLRQGMFAQLVAQNVLLIDXPLSWYSDPGLAGVSLTGGLSYKEDTKELVVAKAGVYYVFFQLELRRVVAGEGSGSVSLALHLQPLRSAAGAAALALTVDLPPASSEARNSAFGFQGRLLHLSAGQRLGVHLHTEARARHAWQLTQGATVLGLFRVTPEIPAGLPSPRSE

SEQ ID NO: 112 - protein, 174 aa, Artificial sequence
  synthetic sequence
  misc_feature (26)..(26): any amino acid other than proline
PAGLLDLRQGMFAQLVAQNVLLIGGXLSWYSDPGLAGVSLTGGLSYKEDTKELVVAKAGVYYVFFQLELRRVVAGEGSGSVSLALHLQPLRSAAGAAALALTVDLPPASSEARNSAFGFQGRLLHLSAGQRLGVHLHTEARARHAWQLTQGATVLGLFRVTPEIPAGLPSPRSE

SEQ ID NO: 113 - protein, 174 aa, Artificial sequence
  synthetic sequence
  misc_feature (27)..(27): any amino acid other than leucine
PAGLLDLRQGMFAQLVAQNVLLIGGPXSWYSDPGLAGVSLTGGLSYKEDTKELVVAKAGVYYVFFQLELRRVVAGEGSGSVSLALHLQPLRSAAGAAALALTVDLPPASSEARNSAFGFQGRLLHLSAGQRLGVHLHTEARARHAWQLTQGATVLGLFRVTPEIPAGLPSPRSE

SEQ ID NO: 114 - protein, 174 aa, Artificial sequence
  synthetic sequence
  misc_feature (28)..(28): any amino acid other than serine
PAGLLDLRQGMFAQLVAQNVLLIGGPLXWYSDPGLAGVSLTGGLSYKEDTKELVVAKAGVYYVFFQLELRRVVAGEGSGSVSLALHLQPLRSAAGAAALALTVDLPPASSEARNSAFGFQGRLLHLSAGQRLGVHLHTEARARHAWQLTQGATVLGLFRVTPEIPAGLPSPRSE

SEQ ID NO: 115 - protein, 174 aa, Artificial sequence
  synthetic sequence
  misc_feature (29)..(29): any amino acid other than tryptophan
PAGLLDLRQGMFAQLVAQNVLLIGGPLSXYSDPGLAGVSLTGGLSYKEDTKELVVAKAGVYYVFFQLELRRVVAGEGSGSVSLALHLQPLRSAAGAAALALTVDLPPASSEARNSAFGFQGRLLHLSAGQRLGVHLHTEARARHAWQLTQGATVLGLFRVTPEIPAGLPSPRSE

SEQ ID NO: 116 - protein, 174 aa, Artificial sequence
  synthetic sequence
  misc_feature (30)..(30): any amino acid other than tyrosine
PAGLLDLRQGMFAQLVAQNVLLIGGPLSWXSDPGLAGVSLTGGLSYKEDTKELVVAKAGVYYVFFQLELRRVVAGEGSGSVSLALHLQPLRSAAGAAALALTVDLPPASSEARNSAFGFQGRLLHLSAGQRLGVHLHTEARARHAWQLTQGATVLGLFRVTPEIPAGLPSPRSE

SEQ ID NO: 117 - protein, 174 aa, Artificial sequence
  synthetic sequence
  misc_feature (31)..(31): any amino acid other than serine
PAGLLDLRQGMFAQLVAQNVLLIGGPLSWYXDPGLAGVSLTGGLSYKEDTKELVVAKAGVYYVFFQLELRRVVAGEGSGSVSLALHLQPLRSAAGAAALALTVDLPPASSEARNSAFGFQGRLLHLSAGQRLGVHLHTEARARHAWQLTQGATVLGLFRVTPEIPAGLPSPRSE

SEQ ID NO: 118 - protein, 174 aa, Artificial sequence
  synthetic sequence
  misc_feature (32)..(32): any amino acid other than aspartic acid
PAGLLDLRQGMFAQLVAQNVLLIGGPLSWYSXPGLAGVSLTGGLSYKEDTKELVVAKAGVYYVFFQLELRRVVAGEGSGSVSLALHLQPLRSAAGAAALALTVDLPPASSEARNSAFGFQGRLLHLSAGQRLGVHLHTEARARHAWQLTQGATVLGLFRVTPEIPAGLPSPRSE

SEQ ID NO: 119 - protein, 174 aa, Artificial sequence
  synthetic sequence
  misc_feature (33)..(33): any amino acid other than proline
PAGLLDLRQGMFAQLVAQNVLLIGGPLSWYSDXGLAGVSLTGGLSYKEDTKELVVAKAGVYYVFFQLELRRVVAGEGSGSVSLALHLQPLRSAAGAAALALTVDLPPASSEARNSAFGFQGRLLHLSAGQRLGVHLHTEARARHAWQLTQGATVLGLFRVTPEIPAGLPSPRSE

SEQ ID NO: 120 - protein, 174 aa, Artificial sequence
  synthetic sequence
  misc_feature (34)..(34): any amino acid other than glycine
PAGLLDLRQGMFAQLVAQNVLLIGGPLSWYSDPXLAGVSLTGGLSYKEDTKELVVAKAGVYYVFFQLELRRVVAGEGSGSVSLALHLQPLRSAAGAAALALTVDLPPASSEARNSAFGFQGRLLHLSAGQRLGVHLHTEARARHAWQLTQGATVLGLFRVTPEIPAGLPSPRSE

SEQ ID NO: 121 - protein, 174 aa, Artificial sequence
  synthetic sequence
  misc_feature (35)..(35): any amino acid other than leucine
PAGLLDLRQGMFAQLVAQNVLLIGGPLSWYSDPGXAGVSLTGGLSYKEDTKELVVAKAGVYYVFFQLELRRVVAGEGSGSVSLALHLQPLRSAAGAAALALTVDLPPASSEARNSAFGFQGRLLHLSAGQRLGVHLHTEARARHAWQLTQGATVLGLFRVTPEIPAGLPSPRSE

SEQ ID NO: 122 - protein, 174 aa, Artificial sequence
  synthetic sequence
  misc_feature (37)..(37): any amino acid other than glycine
PAGLLDLRQGMFAQLVAQNVLLIGGPLSWYSDPGLAXVSLTGGLSYKEDTKELVVAKAGVYYVFFQLELRRVVAGEGSGSVSLALHLQPLRSAAGAAALALTVDLPPASSEARNSAFGFQGRLLHLSAGQRLGVHLHTEARARHAWQLTQGATVLGLFRVTPEIPAGLPSPRSE

SEQ ID NO: 123 - protein, 174 aa, Artificial sequence
  synthetic sequence
  misc_feature (38)..(38): any amino acid other than valine
PAGLLDLRQGMFAQLVAQNVLLIGGPLSWYSDPGLAGXSLTGGLSYKEDTKELVVAKAGVYYVFFQLELRRVVAGEGSGSVSLALHLQPLRSAAGAAALALTVDLPPASSEARNSAFGFQGRLLHLSAGQRLGVHLHTEARARHAWQLTQGATVLGLFRVTPEIPAGLPSPRSE

SEQ ID NO: 124 - protein, 174 aa, Artificial sequence
  synthetic sequence
  misc_feature (39)..(39): any amino acid other than serine
PAGLLDLRQGMFAQLVAQNVLLIGGPLSWYSDPGLAGVXLTGGLSYKEDTKELVVAKAGVYYVFFQLELRRVVAGEGSGSVSLALHLQPLRSAAGAAALALTVDLPPASSEARNSAFGFQGRLLHLSAGQRLGVHLHTEARARHAWQLTQGATVLGLFRVTPEIPAGLPSPRSE

SEQ ID NO: 125 - protein, 174 aa, Artificial sequence
  synthetic sequence
  misc_feature (40)..(40): any amino acid other than leucine
PAGLLDLRQGMFAQLVAQNVLLIGGPLSWYSDPGLAGVSXTGGLSYKEDTKELVVAKAGVYYVFFQLELRRVVAGEGSGSVSLALHLQPLRSAAGAAALALTVDLPPASSEARNSAFGFQGRLLHLSAGQRLGVHLHTEARARHAWQLTQGATVLGLFRVTPEIPAGLPSPRSE

SEQ ID NO: 126 - protein, 174 aa, Artificial sequence
  synthetic sequence
  misc_feature (41)..(41): any amino acid other than threonine
PAGLLDLRQGMFAQLVAQNVLLIGGPLSWYSDPGLAGVSLXGGLSYKEDTKELVVAKAGVYYVFFQLELRRVVAGEGSGSVSLALHLQPLRSAAGAAALALTVDLPPASSEARNSAFGFQGRLLHLSAGQRLGVHLHTEARARHAWQLTQGATVLGLFRVTPEIPAGLPSPRSE

SEQ ID NO: 127 - protein, 174 aa, Artificial sequence
  synthetic sequence
  misc_feature (42)..(42): any amino acid other than glycine
PAGLLDLRQGMFAQLVAQNVLLIGGPLSWYSDPGLAGVSLTXGLSYKEDTKELVVAKAGVYYVFFQLELRRVVAGEGSGSVSLALHLQPLRSAAGAAALALTVDLPPASSEARNSAFGFQGRLLHLSAGQRLGVHLHTEARARHAWQLTQGATVLGLFRVTPEIPAGLPSPRSE

SEQ ID NO: 128 - protein, 174 aa, Artificial sequence
  synthetic sequence
  misc_feature (43)..(43): any amino acid other than glycine
PAGLLDLRQGMFAQLVAQNVLLIGGPLSWYSDPGLAGVSLTGXLSYKEDTKELVVAKAGVYYVFFQLELRRVVAGEGSGSVSLALHLQPLRSAAGAAALALTVDLPPASSEARNSAFGFQGRLLHLSAGQRLGVHLHTEARARHAWQLTQGATVLGLFRVTPEIPAGLPSPRSE

SEQ ID NO: 129 - protein, 174 aa, Artificial sequence
  synthetic sequence
  misc_feature (44)..(44): any amino acid other than leucine
PAGLLDLRQGMFAQLVAQNVLLIGGPLSWYSDPGLAGVSLTGGXSYKEDTKELVVAKAGVYYVFFQLELRRVVAGEGSGSVSLALHLQPLRSAAGAAALALTVDLPPASSEARNSAFGFQGRLLHLSAGQRLGVHLHTEARARHAWQLTQGATVLGLFRVTPEIPAGLPSPRSE

SEQ ID NO: 130 - protein, 174 aa, Artificial sequence
  synthetic sequence
  misc_feature (45)..(45): any amino acid other than serine
PAGLLDLRQGMFAQLVAQNVLLIGGPLSWYSDPGLAGVSLTGGLXYKEDTKELVVAKAGVYYVFFQLELRRVVAGEGSGSVSLALHLQPLRSAAGAAALALTVDLPPASSEARNSAFGFQGRLLHLSAGQRLGVHLHTEARARHAWQLTQGATVLGLFRVTPEIPAGLPSPRSE

SEQ ID NO: 131 - protein, 174 aa, Artificial sequence
  synthetic sequence
  misc_feature (46)..(46): any amino acid other than tyrosine
PAGLLDLRQGMFAQLVAQNVLLIGGPLSWYSDPGLAGVSLTGGLSXKEDTKELVVAKAGVYYVFFQLELRRVVAGEGSGSVSLALHLQPLRSAAGAAALALTVDLPPASSEARNSAFGFQGRLLHLSAGQRLGVHLHTEARARHAWQLTQGATVLGLFRVTPEIPAGLPSPRSE

SEQ ID NO: 132 - protein, 174 aa, Artificial sequence
  synthetic sequence
  misc_feature (48)..(48): any amino acid other than glutamic acid
PAGLLDLRQGMFAQLVAQNVLLIGGPLSWYSDPGLAGVSLTGGLSYKXDTKELVVAKAGVYYVFFQLELRRVVAGEGSGSVSLALHLQPLRSAAGAAALALTVDLPPASSEARNSAFGFQGRLLHLSAGQRLGVHLHTEARARHAWQLTQGATVLGLFRVTPEIPAGLPSPRSE

SEQ ID NO: 133 - protein, 174 aa, Artificial sequence
  synthetic sequence
  misc_feature (49)..(49): any amino acid other than aspartic acid
PAGLLDLRQGMFAQLVAQNVLLIGGPLSWYSDPGLAGVSLTGGLSYKEXTKELVVAKAGVYYVFFQLELRRVVAGEGSGSVSLALHLQPLRSAAGAAALALTVDLPPASSEARNSAFGFQGRLLHLSAGQRLGVHLHTEARARHAWQLTQGATVLGLFRVTPEIPAGLPSPRSE

SEQ ID NO: 134 - protein, 174 aa, Artificial sequence
  synthetic sequence
  misc_feature (50)..(50): any amino acid other than threonine
PAGLLDLRQGMFAQLVAQNVLLIGGPLSWYSDPGLAGVSLTGGLSYKEDXKELVVAKAGVYYVFFQLELRRVVAGEGSGSVSLALHLQPLRSAAGAAALALTVDLPPASSEARNSAFGFQGRLLHLSAGQRLGVHLHTEARARHAWQLTQGATVLGLFRVTPEIPAGLPSPRSE

SEQ ID NO: 135 - protein, 174 aa, Artificial sequence
  synthetic sequence
  misc_feature (51)..(51): any amino acid other than lysine
PAGLLDLRQGMFAQLVAQNVLLIGGPLSWYSDPGLAGVSLTGGLSYKEDTXELVVAKAGVYYVFFQLELRRVVAGEGSGSVSLALHLQPLRSAAGAAALALTVDLPPASSEARNSAFGFQGRLLHLSAGQRLGVHLHTEARARHAWQLTQGATVLGLFRVTPEIPAGLPSPRSE

SEQ ID NO: 136 - protein, 174 aa, Artificial sequence
  synthetic sequence
  misc_feature (52)..(52): any amino acid other than glutamic acid
PAGLLDLRQGMFAQLVAQNVLLIGGPLSWYSDPGLAGVSLTGGLSYKEDTKXLVVAKAGVYYVFFQLELRRVVAGEGSGSVSLALHLQPLRSAAGAAALALTVDLPPASSEARNSAFGFQGRLLHLSAGQRLGVHLHTEARARHAWQLTQGATVLGLFRVTPEIPAGLPSPRSE

SEQ ID NO: 137 - protein, 174 aa, Artificial sequence
  synthetic sequence
  misc_feature (64)..(64): any amino acid other than phenylalanine
PAGLLDLRQGMFAQLVAQNVLLIGGPLSWYSDPGLAGVSLTGGLSYKEDTKELVVAKAGVYYVXFQLELRRVVAGEGSGSVSLALHLQPLRSAAGAAALALTVDLPPASSEARNSAFGFQGRLLHLSAGQRLGVHLHTEARARHAWQLTQGATVLGLFRVTPEIPAGLPSPRSE

SEQ ID NO: 138 - protein, 174 aa, Artificial sequence
  synthetic sequence
  misc_feature (65)..(65): any amino acid other than phenylalanine
PAGLLDLRQGMFAQLVAQNVLLIGGPLSWYSDPGLAGVSLTGGLSYKEDTKELVVAKAGVYYVFXQLELRRVVAGEGSGSVSLALHLQPLRSAAGAAALALTVDLPPASSEARNSAFGFQGRLLHLSAGQRLGVHLHTEARARHAWQLTQGATVLGLFRVTPEIPAGLPSPRSE

SEQ ID NO: 139 - protein, 174 aa, Artificial sequence
  synthetic sequence
  misc_feature (66)..(66): any amino acid other than glutamine
PAGLLDLRQGMFAQLVAQNVLLIGGPLSWYSDPGLAGVSLTGGLSYKEDTKELVVAKAGVYYVFFXLELRRVVAGEGSGSVSLALHLQPLRSAAGAAALALTVDLPPASSEARNSAFGFQGRLLHLSAGQRLGVHLHTEARARHAWQLTQGATVLGLFRVTPEIPAGLPSPRSE

SEQ ID NO: 140 - protein, 174 aa, Artificial sequence
  synthetic sequence
  misc_feature (67)..(67): any amino acid other than leucine
PAGLLDLRQGMFAQLVAQNVLLIGGPLSWYSDPGLAGVSLTGGLSYKEDTKELVVAKAGVYYVFFQXELRRVVAGEGSGSVSLALHLQPLRSAAGAAALALTVDLPPASSEARNSAFGFQGRLLHLSAGQRLGVHLHTEARARHAWQLTQGATVLGLFRVTPEIPAGLPSPRSE

SEQ ID NO: 141 - protein, 174 aa, Artificial sequence
  synthetic sequence
  misc_feature (68)..(68): any amino acid other than glutamic acid
PAGLLDLRQGMFAQLVAQNVLLIGGPLSWYSDPGLAGVSLTGGLSYKEDTKELVVAKAGVYYVFFQLXLRRVVAGEGSGSVSLALHLQPLRSAAGAAALALTVDLPPASSEARNSAFGFQGRLLHLSAGQRLGVHLHTEARARHAWQLTQGATVLGLFRVTPEIPAGLPSPRSE

SEQ ID NO: 142 - protein, 174 aa, Artificial sequence
  synthetic sequence
  misc_feature (69)..(69): any amino acid other than leucine
PAGLLDLRQGMFAQLVAQNVLLIGGPLSWYSDPGLAGVSLTGGLSYKEDTKELVVAKAGVYYVFFQLEXRRVVAGEGSGSVSLALHLQPLRSAAGAAALALTVDLPPASSEARNSAFGFQGRLLHLSAGQRLGVHLHTEARARHAWQLTQGATVLGLFRVTPEIPAGLPSPRSE

SEQ ID NO: 143 - protein, 174 aa, Artificial sequence
  synthetic sequence
  misc_feature (70)..(70): any amino acid other than arginine
PAGLLDLRQGMFAQLVAQNVLLIGGPLSWYSDPGLAGVSLTGGLSYKEDTKELVVAKAGVYYVFFQLELXRVVAGEGSGSVSLALHLQPLRSAAGAAALALTVDLPPASSEARNSAFGFQGRLLHLSAGQRLGVHLHTEARARHAWQLTQGATVLGLFRVTPEIPAGLPSPRSE

SEQ ID NO: 144 - protein, 174 aa, Artificial sequence
  synthetic sequence
  misc_feature (71)..(71): any amino acid other than arginine
PAGLLDLRQGMFAQLVAQNVLLIGGPLSWYSDPGLAGVSLTGGLSYKEDTKELVVAKAGVYYVFFQLELRXVVAGEGSGSVSLALHLQPLRSAAGAAALALTVDLPPASSEARNSAFGFQGRLLHLSAGQRLGVHLHTEARARHAWQLTQGATVLGLFRVTPEIPAGLPSPRSE

SEQ ID NO: 145 - protein, 174 aa, Artificial sequence
  synthetic sequence
  misc_feature (72)..(72): any amino acid other than valine
PAGLLDLRQGMFAQLVAQNVLLIGGPLSWYSDPGLAGVSLTGGLSYKEDTKELVVAKAGVYYVFFQLELRRXVAGEGSGSVSLALHLQPLRSAAGAAALALTVDLPPASSEARNSAFGFQGRLLHLSAGQRLGVHLHTEARARHAWQLTQGATVLGLFRVTPEIPAGLPSPRSE

SEQ ID NO: 146 - protein, 174 aa, Artificial sequence
  synthetic sequence
  misc_feature (73)..(73): any amino acid other than valine
PAGLLDLRQGMFAQLVAQNVLLIGGPLSWYSDPGLAGVSLTGGLSYKEDTKELVVAKAGVYYVFFQLELRRVXAGEGSGSVSLALHLQPLRSAAGAAALALTVDLPPASSEARNSAFGFQGRLLHLSAGQRLGVHLHTEARARHAWQLTQGATVLGLFRVTPEIPAGLPSPRSE

SEQ ID NO: 147 - protein, 174 aa, Artificial sequence
  synthetic sequence
  misc_feature (75)..(75): any amino acid other than glycine
PAGLLDLRQGMFAQLVAQNVLLIGGPLSWYSDPGLAGVSLTGGLSYKEDTKELVVAKAGVYYVFFQLELRRVVAXEGSGSVSLALHLQPLRSAAGAAALALTVDLPPASSEARNSAFGFQGRLLHLSAGQRLGVHLHTEARARHAWQLTQGATVLGLFRVTPEIPAGLPSPRSE

SEQ ID NO: 148 - protein, 174 aa, Artificial sequence
  synthetic sequence
  misc_feature (76)..(76): any amino acid other than glutamic acid
PAGLLDLRQGMFAQLVAQNVLLIGGPLSWYSDPGLAGVSLTGGLSYKEDTKELVVAKAGVYYVFFQLELRRVVAGXGSGSVSLALHLQPLRSAAGAAALALTVDLPPASSEARNSAFGFQGRLLHLSAGQRLGVHLHTEARARHAWQLTQGATVLGLFRVTPEIPAGLPSPRSE

SEQ ID NO: 149 - protein, 174 aa, Artificial sequence
  synthetic sequence
  misc_feature (77)..(77): any amino acid other than glycine
PAGLLDLRQGMFAQLVAQNVLLIGGPLSWYSDPGLAGVSLTGGLSYKEDTKELVVAKAGVYYVFFQLELRRVVAGEXSGSVSLALHLQPLRSAAGAAALALTVDLPPASSEARNSAFGFQGRLLHLSAGQRLGVHLHTEARARHAWQLTQGATVLGLFRVTPEIPAGLPSPRSE

SEQ ID NO: 150 - protein, 174 aa, Artificial sequence
  synthetic sequence
  misc_feature (78)..(78): any amino acid other than serine
PAGLLDLRQGMFAQLVAQNVLLIGGPLSWYSDPGLAGVSLTGGLSYKEDTKELVVAKAGVYYVFFQLELRRVVAGEGXGSVSLALHLQPLRSAAGAAALALTVDLPPASSEARNSAFGFQGRLLHLSAGQRLGVHLHTEARARHAWQLTQGATVLGLFRVTPEIPAGLPSPRSE

SEQ ID NO: 151 - protein, 174 aa, Artificial sequence
  synthetic sequence
  misc_feature (104)..(104): any amino acid other than aspartic acid
PAGLLDLRQGMFAQLVAQNVLLIGGPLSWYSDPGLAGVSLTGGLSYKEDTKELVVAKAGVYYVFFQLELRRVVAGEGSGSVSLALHLQPLRSAAGAAALALTVXLPPASSEARNSAFGFQGRLLHLSAGQRLGVHLHTEARARHAWQLTQGATVLGLFRVTPEIPAGLPSPRSE

SEQ ID NO: 152 - protein, 174 aa, Artificial sequence
  synthetic sequence
  misc_feature (105)..(105): any amino acid other than leucine
PAGLLDLRQGMFAQLVAQNVLLIGGPLSWYSDPGLAGVSLTGGLSYKEDTKELVVAKAGVYYVFFQLELRRVVAGEGSGSVSLALHLQPLRSAAGAAALALTVDXPPASSEARNSAFGFQGRLLHLSAGQRLGVHLHTEARARHAWQLTQGATVLGLFRVTPEIPAGLPSPRSE

SEQ ID NO: 153 - protein, 174 aa, Artificial sequence
  synthetic sequence
  misc_feature (106)..(106): any amino acid other than proline
PAGLLDLRQGMFAQLVAQNVLLIGGPLSWYSDPGLAGVSLTGGLSYKEDTKELVVAKAGVYYVFFQLELRRVVAGEGSGSVSLALHLQPLRSAAGAAALALTVDLXPASSEARNSAFGFQGRLLHLSAGQRLGVHLHTEARARHAWQLTQGATVLGLFRVTPEIPAGLPSPRSE

SEQ ID NO: 154 - protein, 174 aa, Artificial sequence
  synthetic sequence
  misc_feature (109)..(109): any amino acid other than serine
PAGLLDLRQGMFAQLVAQNVLLIGGPLSWYSDPGLAGVSLTGGLSYKEDTKELVVAKAGVYYVFFQLELRRVVAGEGSGSVSLALHLQPLRSAAGAAALALTVDLPPAXSEARNSAFGFQGRLLHLSAGQRLGVHLHTEARARHAWQLTQGATVLGLFRVTPEIPAGLPSPRSE

SEQ ID NO: 155 - protein, 174 aa, Artificial sequence
  synthetic sequence
  misc_feature (110)..(110): any amino acid other than serine
PAGLLDLRQGMFAQLVAQNVLLIGGPLSWYSDPGLAGVSLTGGLSYKEDTKELVVAKAGVYYVFFQLELRRVVAGEGSGSVSLALHLQPLRSAAGAAALALTVDLPPASXEARNSAFGFQGRLLHLSAGQRLGVHLHTEARARHAWQLTQGATVLGLFRVTPEIPAGLPSPRSE

SEQ ID NO: 156 - protein, 174 aa, Artificial sequence
  synthetic sequence
  misc_feature (111)..(111): any amino acid other than glutamic acid
PAGLLDLRQGMFAQLVAQNVLLIGGPLSWYSDPGLAGVSLTGGLSYKEDTKELVVAKAGVYYVFFQLELRRVVAGEGSGSVSLALHLQPLRSAAGAAALALTVDLPPASSXARNSAFGFQGRLLHLSAGQRLGVHLHTEARARHAWQLTQGATVLGLFRVTPEIPAGLPSPRSE

SEQ ID NO: 157 - protein, 174 aa, Artificial sequence
  synthetic sequence
  misc_feature (113)..(113): any amino acid other than arginine
PAGLLDLRQGMFAQLVAQNVLLIGGPLSWYSDPGLAGVSLTGGLSYKEDTKELVVAKAGVYYVFFQLELRRVVAGEGSGSVSLALHLQPLRSAAGAAALALTVDLPPASSEAXNSAFGFQGRLLHLSAGQRLGVHLHTEARARHAWQLTQGATVLGLFRVTPEIPAGLPSPRSE

SEQ ID NO: 158 - protein, 174 aa, Artificial sequence
  synthetic sequence
  misc_feature (114)..(114): any amino acid other than asparagine
PAGLLDLRQGMFAQLVAQNVLLIGGPLSWYSDPGLAGVSLTGGLSYKEDTKELVVAKAGVYYVFFQLELRRVVAGEGSGSVSLALHLQPLRSAAGAAALALTVDLPPASSEARXSAFGFQGRLLHLSAGQRLGVHLHTEARARHAWQLTQGATVLGLFRVTPEIPAGLPSPRSE

SEQ ID NO: 159 - protein, 174 aa, Artificial sequence
  synthetic sequence
  misc_feature (115)..(115): any amino acid other than serine
PAGLLDLRQGMFAQLVAQNVLLIGGPLSWYSDPGLAGVSLTGGLSYKEDTKELVVAKAGVYYVFFQLELRRVVAGEGSGSVSLALHLQPLRSAAGAAALALTVDLPPASSEARNXAFGFQGRLLHLSAGQRLGVHLHTEARARHAWQLTQGATVLGLFRVTPEIPAGLPSPRSE

SEQ ID NO: 160 - protein, 174 aa, Artificial sequence
  synthetic sequence
  misc_feature (117)..(117): any amino acid other than phenylalanine
PAGLLDLRQGMFAQLVAQNVLLIGGPLSWYSDPGLAGVSLTGGLSYKEDTKELVVAKAGVYYVFFQLELRRVVAGEGSGSVSLALHLQPLRSAAGAAALALTVDLPPASSEARNSAXGFQGRLLHLSAGQRLGVHLHTEARARHAWQLTQGATVLGLFRVTPEIPAGLPSPRSE

SEQ ID NO: 161 - protein, 174 aa, Artificial sequence
  synthetic sequence
  misc_feature (130)..(130): any amino acid other than glutamine
PAGLLDLRQGMFAQLVAQNVLLIGGPLSWYSDPGLAGVSLTGGLSYKEDTKELVVAKAGVYYVFFQLELRRVVAGEGSGSVSLALHLQPLRSAAGAAALALTVDLPPASSEARNSAFGFQGRLLHLSAGXRLGVHLHTEARARHAWQLTQGATVLGLFRVTPEIPAGLPSPRSE

SEQ ID NO: 162 - protein, 174 aa, Artificial sequence
  synthetic sequence
  misc_feature (131)..(131): any amino acid other than arginine
PAGLLDLRQGMFAQLVAQNVLLIGGPLSWYSDPGLAGVSLTGGLSYKEDTKELVVAKAGVYYVFFQLELRRVVAGEGSGSVSLALHLQPLRSAAGAAALALTVDLPPASSEARNSAFGFQGRLLHLSAGQXLGVHLHTEARARHAWQLTQGATVLGLFRVTPEIPAGLPSPRSE

SEQ ID NO: 163 - protein, 174 aa, Artificial sequence
  synthetic sequence
  misc_feature (132)..(132): any amino acid other than leucine
PAGLLDLRQGMFAQLVAQNVLLIGGPLSWYSDPGLAGVSLTGGLSYKEDTKELVVAKAGVYYVFFQLELRRVVAGEGSGSVSLALHLQPLRSAAGAAALALTVDLPPASSEARNSAFGFQGRLLHLSAGQRXGVHLHTEARARHAWQLTQGATVLGLFRVTPEIPAGLPSPRSE

SEQ ID NO: 164 - protein, 174 aa, Artificial sequence
  synthetic sequence
  misc_feature (133)..(133): any amino acid other than glycine
PAGLLDLRQGMFAQLVAQNVLLIGGPLSWYSDPGLAGVSLTGGLSYKEDTKELVVAKAGVYYVFFQLELRRVVAGEGSGSVSLALHLQPLRSAAGAAALALTVDLPPASSEARNSAFGFQGRLLHLSAGQRLXVHLHTEARARHAWQLTQGATVLGLFRVTPEIPAGLPSPRSE

SEQ ID NO: 165 - protein, 174 aa, Artificial sequence
  synthetic sequence
  misc_feature (134)..(134): any amino acid other than valine
PAGLLDLRQGMFAQLVAQNVLLIGGPLSWYSDPGLAGVSLTGGLSYKEDTKELVVAKAGVYYVFFQLELRRVVAGEGSGSVSLALHLQPLRSAAGAAALALTVDLPPASSEARNSAFGFQGRLLHLSAGQRLGXHLHTEARARHAWQLTQGATVLGLFRVTPEIPAGLPSPRSE

SEQ ID NO: 166 - protein, 174 aa, Artificial sequence
  synthetic sequence
  misc_feature (135)..(135): any amino acid other than histidine
PAGLLDLRQGMFAQLVAQNVLLIGGPLSWYSDPGLAGVSLTGGLSYKEDTKELVVAKAGVYYVFFQLELRRVVAGEGSGSVSLALHLQPLRSAAGAAALALTVDLPPASSEARNSAFGFQGRLLHLSAGQRLGVXLHTEARARHAWQLTQGATVLGLFRVTPEIPAGLPSPRSE

SEQ ID NO: 167 - protein, 174 aa, Artificial sequence
  synthetic sequence
  misc_feature (136)..(136): any amino acid other than leucine
PAGLLDLRQGMFAQLVAQNVLLIGGPLSWYSDPGLAGVSLTGGLSYKEDTKELVVAKAGVYYVFFQLELRRVVAGEGSGSVSLALHLQPLRSAAGAAALALTVDLPPASSEARNSAFGFQGRLLHLSAGQRLGVHXHTEARARHAWQLTQGATVLGLFRVTPEIPAGLPSPRSE

SEQ ID NO: 168 - protein, 174 aa, Artificial sequence
  synthetic sequence
  misc_feature (137)..(137): any amino acid other than histidine
PAGLLDLRQGMFAQLVAQNVLLIGGPLSWYSDPGLAGVSLTGGLSYKEDTKELVVAKAGVYYVFFQLELRRVVAGEGSGSVSLALHLQPLRSAAGAAALALTVDLPPASSEARNSAFGFQGRLLHLSAGQRLGVHLXTEARARHAWQLTQGATVLGLFRVTPEIPAGLPSPRSE

SEQ ID NO: 169 - protein, 174 aa, Artificial sequence
  synthetic sequence
  misc_feature (138)..(138): any amino acid other than threonine
PAGLLDLRQGMFAQLVAQNVLLIGGPLSWYSDPGLAGVSLTGGLSYKEDTKELVVAKAGVYYVFFQLELRRVVAGEGSGSVSLALHLQPLRSAAGAAALALTVDLPPASSEARNSAFGFQGRLLHLSAGQRLGVHLHXEARARHAWQLTQGATVLGLFRVTPEIPAGLPSPRSE

SEQ ID NO: 170 - protein, 174 aa, Artificial sequence
  synthetic sequence
  misc_feature (139)..(139): any amino acid other than glutamic acid
PAGLLDLRQGMFAQLVAQNVLLIGGPLSWYSDPGLAGVSLTGGLSYKEDTKELVVAKAGVYYVFFQLELRRVVAGEGSGSVSLALHLQPLRSAAGAAALALTVDLPPASSEARNSAFGFQGRLLHLSAGQRLGVHLHTXARARHAWQLTQGATVLGLFRVTPEIPAGLPSPRSE

SEQ ID NO: 171 - protein, 174 aa, Artificial sequence
  synthetic sequence
  misc_feature (141)..(141): any amino acid other than arginine
PAGLLDLRQGMFAQLVAQNVLLIGGPLSWYSDPGLAGVSLTGGLSYKEDTKELVVAKAGVYYVFFQLELRRVVAGEGSGSVSLALHLQPLRSAAGAAALALTVDLPPASSEARNSAFGFQGRLLHLSAGQRLGVHLHTEAXARHAWQLTQGATVLGLFRVTPEIPAGLPSPRSE

SEQ ID NO: 172 - protein, 174 aa, Artificial sequence
  synthetic sequence
  misc_feature (143)..(143): any amino acid other than arginine
PAGLLDLRQGMFAQLVAQNVLLIGGPLSWYSDPGLAGVSLTGGLSYKEDTKELVVAKAGVYYVFFQLELRRVVAGEGSGSVSLALHLQPLRSAAGAAALALTVDLPPASSEARNSAFGFQGRLLHLSAGQRLGVHLHTEARAXHAWQLTQGATVLGLFRVTPEIPAGLPSPRSE

SEQ ID NO: 173 - protein, 174 aa, Artificial sequence
  synthetic sequence
  misc_feature (144)..(144): any amino acid other than histidine
PAGLLDLRQGMFAQLVAQNVLLIGGPLSWYSDPGLAGVSLTGGLSYKEDTKELVVAKAGVYYVFFQLELRRVVAGEGSGSVSLALHLQPLRSAAGAAALALTVDLPPASSEARNSAFGFQGRLLHLSAGQRLGVHLHTEARARXAWQLTQGATVLGLFRVTPEIPAGLPSPRSE

SEQ ID NO: 174 - protein, 174 aa, Artificial sequence
  synthetic sequence
  misc_feature (146)..(146): any amino acid other than tryptophan
PAGLLDLRQGMFAQLVAQNVLLIGGPLSWYSDPGLAGVSLTGGLSYKEDTKELVVAKAGVYYVFFQLELRRVVAGEGSGSVSLALHLQPLRSAAGAAALALTVDLPPASSEARNSAFGFQGRLLHLSAGQRLGVHLHTEARARHAXQLTQGATVLGLFRVTPEIPAGLPSPRSE

SEQ ID NO: 175 - protein, 174 aa, Artificial sequence
  synthetic sequence
  misc_feature (148)..(148): any amino acid other than leucine
PAGLLDLRQGMFAQLVAQNVLLIGGPLSWYSDPGLAGVSLTGGLSYKEDTKELVVAKAGVYYVFFQLELRRVVAGEGSGSVSLALHLQPLRSAAGAAALALTVDLPPASSEARNSAFGFQGRLLHLSAGQRLGVHLHTEARARHAWQXTQGATVLGLFRVTPEIPAGLPSPRSE

SEQ ID NO: 176 - protein, 174 aa, Artificial sequence
  synthetic sequence
  misc_feature (149)..(149): any amino acid other than threonine
PAGLLDLRQGMFAQLVAQNVLLIGGPLSWYSDPGLAGVSLTGGLSYKEDTKELVVAKAGVYYVFFQLELRRVVAGEGSGSVSLALHLQPLRSAAGAAALALTVDLPPASSEARNSAFGFQGRLLHLSAGQRLGVHLHTEARARHAWQLXQGATVLGLFRVTPEIPAGLPSPRSE

SEQ ID NO: 177 - protein, 174 aa, Artificial sequence
  synthetic sequence
  misc_feature (150)..(150): any amino acid other than glutamine
PAGLLDLRQGMFAQLVAQNVLLIGGPLSWYSDPGLAGVSLTGGLSYKEDTKELVVAKAGVYYVFFQLELRRVVAGEGSGSVSLALHLQPLRSAAGAAALALTVDLPPASSEARNSAFGFQGRLLHLSAGQRLGVHLHTEARARHAWQLTXGATVLGLFRVTPEIPAGLPSPRSE

SEQ ID NO: 178 - protein, 174 aa, Artificial sequence
  synthetic sequence
  misc_feature (151)..(151): any amino acid other than glycine
PAGLLDLRQGMFAQLVAQNVLLIGGPLSWYSDPGLAGVSLTGGLSYKEDTKELVVAKAGVYYVFFQLELRRVVAGEGSGSVSLALHLQPLRSAAGAAALALTVDLPPASSEARNSAFGFQGRLLHLSAGQRLGVHLHTEARARHAWQLTQXATVLGLFRVTPEIPAGLPSPRSE

SEQ ID NO: 179 - protein, 174 aa, Artificial sequence
  synthetic sequence
  misc_feature (153)..(153): any amino acid other than threonine
PAGLLDLRQGMFAQLVAQNVLLIGGPLSWYSDPGLAGVSLTGGLSYKEDTKELVVAKAGVYYVFFQLELRRVVAGEGSGSVSLALHLQPLRSAAGAAALALTVDLPPASSEARNSAFGFQGRLLHLSAGQRLGVHLHTEARARHAWQLTQGAXVLGLFRVTPEIPAGLPSPRSE

SEQ ID NO: 180 - protein, 174 aa, Artificial sequence
  synthetic sequence
  misc_feature (154)..(154): any amino acid other than valine
PAGLLDLRQGMFAQLVAQNVLLIGGPLSWYSDPGLAGVSLTGGLSYKEDTKELVVAKAGVYYVFFQLELRRVVAGEGSGSVSLALHLQPLRSAAGAAALALTVDLPPASSEARNSAFGFQGRLLHLSAGQRLGVHLHTEARARHAWQLTQGATXLGLFRVTPEIPAGLPSPRSE

SEQ ID NO: 181 - protein, 133 aa, Artificial sequence
  synthetic sequence
  misc_feature (42)..(42): any amino acid other than phenylalanine
APTSSSTKKTQLQLEHLLLDLQMILNGINNYKNPKLTRMLTXKFYMPKKATELKHLQCLEEELKPLEEVLNLAQSKNFHLRPRDLISNINVIVLELKGSETTFMCEYADETATIVEFLNRWITFCQSIISTLT

SEQ ID NO: 182 - protein, 133 aa, Artificial sequence
  synthetic sequence
  misc_feature (20)..(20): any amino acid other than aspartic acid
APTSSSTKKTQLQLEHLLLXLQMILNGINNYKNPKLTRMLTFKFYMPKKATELKHLQCLEEELKPLEEVLNLAQSKNFHLRPRDLISNINVIVLELKGSETTFMCEYADETATIVEFLNRWITFCQSIISTLT

SEQ ID NO: 183 - protein, 133 aa, Artificial sequence
  synthetic sequence
  misc_feature (15)..(15): any amino acid other than glutamic acid
APTSSSTKKTQLQLXHLLLDLQMILNGINNYKNPKLTRMLTFKFYMPKKATELKHLQCLEEELKPLEEVLNLAQSKNFHLRPRDLISNINVIVLELKGSETTFMCEYADETATIVEFLNRWITFCQSIISTLT

SEQ ID NO: 184 - protein, 133 aa, Artificial sequence
  synthetic sequence
  misc_feature (16)..(16): any amino acid other than histidine
APTSSSTKKTQLQLEXLLLDLQMILNGINNYKNPKLTRMLTFKFYMPKKATELKHLQCLEEELKPLEEVLNLAQSKNFHLRPRDLISNINVIVLELKGSETTFMCEYADETATIVEFLNRWITFCQSIISTLT

SEQ ID NO: 185 - protein, 133 aa, Artificial sequence; identical to SEQ ID NO: 184
  synthetic sequence
  misc_feature (16)..(16): any amino acid other than histidine

SEQ ID NO: 186 - protein, 133 aa, Artificial sequence
  synthetic sequence
  misc_feature (45)..(45): any amino acid other than tyrosine
APTSSSTKKTQLQLEHLLLDLQMILNGINNYKNPKLTRMLTFKFXMPKKATELKHLQCLEEELKPLEEVLNLAQSKNFHLRPRDLISNINVIVLELKGSETTFMCEYADETATIVEFLNRWITFCQSIISTLT

SEQ ID NO: 187 - protein, 133 aa, Artificial sequence
  synthetic sequence
  misc_feature (126)..(126): any amino acid other than glutamine
APTSSSTKKTQLQLEHLLLDLQMILNGINNYKNPKLTRMLTFKFYMPKKATELKHLQCLEEELKPLEEVLNLAQSKNFHLRPRDLISNINVIVLELKGSETTFMCEYADETATIVEFLNRWITFCXSIISTLT

SEQ ID NO: 188 - protein, 133 aa, Artificial sequence
  synthetic sequence
  misc_feature (16)..(16): any amino acid other than histidine
  misc_feature (42)..(42): any amino acid other than phenylalanine
APTSSSTKKTQLQLEXLLLDLQMILNGINNYKNPKLTRMLTXKFYMPKKATELKHLQCLEEELKPLEEVLNLAQSKNFHLRPRDLISNINVIVLELKGSETTFMCEYADETATIVEFLNRWITFCQSIISTLT

SEQ ID NO: 189 - protein, 133 aa, Artificial sequence
  synthetic sequence
  misc_feature (20)..(20): any amino acid other than aspartic acid
  misc_feature (42)..(42): any amino acid other than phenylalanine
APTSSSTKKTQLQLEHLLLXLQMILNGINNYKNPKLTRMLTXKFYMPKKATELKHLQCLEEELKPLEEVLNLAQSKNFHLRPRDLISNINVIVLELKGSETTFMCEYADETATIVEFLNRWITFCQSIISTLT

SEQ ID NO: 190 - protein, 133 aa, Artificial sequence
  synthetic sequence
  Misc_feature (15)..(15): any amino acid other than glutamic aicd
  Misc_feature (20)..(20): any amino acid other than aspartic acid
  Misc_feature (42)..(42): any amino acid other than phenylalanine
APTSSSTKKTQLQLXHLLLXLQMILNGINNYKNPKLTRMLTXKFYMPKKATELKHLQCLEEELKPLEEVLNLAQSKNFHLRPRDLISNINVIVLELKGSETTFMCEYADETATIVEFLNRWITFCQSIISTLT

SEQ ID NO: 191 - protein, 133 aa, Artificial sequence
  synthetic sequence
  Misc_feature (16)..(16): any amino acid other than histidine
  Misc_feature (20)..(20): any amino acid other than aspartic acid
  Misc_feature (42)..(42): any amino acid other than phenylalanine
APTSSSTKKTQLQLEXLLLXLQMILNGINNYKNPKLTRMLTXKFYMPKKATELKHLQCLEEELKPLEEVLNLAQSKNFHLRPRDLISNINVIVLELKGSETTFMCEYADETATIVEFLNRWITFCQSIISTLT

SEQ ID NO: 192 - protein, 133 aa, Artificial sequence
  synthetic sequence
  Misc_feature (20)..(20): any amino acid other than aspartic acid
  Misc_feature (42)..(42): any amino acid other than phenylalanine
  Misc_feature (126)..(126): any amino acid other than glutamine
APTSSSTKKTQLQLEHLLLXLQMILNGINNYKNPKLTRMLTXKFYMPKKATELKHLQCLEEELKPLEEVLNLAQSKNFHLRPRDLISNINVIVLELKGSETTFMCEYADETATIVEFLNRWITFCXSIISTLT

SEQ ID NO: 193 - protein, 133 aa, Artificial sequence
  synthetic sequence
  Misc_feature (20)..(20): any amino acid other than aspartic acid
  Misc_feature (42)..(42): any amino acid other than phenylalanine
  Misc_feature (45)..(45): any amino acid other than tyrosine
APTSSSTKKTQLQLEHLLLXLQMILNGINNYKNPKLTRMLTXKFXMPKKATELKHLQCLEEELKPLEEVLNLAQSKNFHLRPRDLISNINVIVLELKGSETTFMCEYADETATIVEFLNRWITFCQSIISTLT

SEQ ID NO: 194 - protein, 133 aa, Artificial sequence
  synthetic sequence
  Misc_feature (16)..(16): any amino acid other than histidine
  Misc_feature (20)..(20): any amino acid other than aspartic acid
  Misc_feature (42)..(42): any amino acid other than phenylalanine
  Misc_feature (45)..(45): any amino acid other than tyrosine
APTSSSTKKTQLQLEXLLLXLQMILNGINNYKNPKLTRMLTXKFXMPKKATELKHLQCLEEELKPLEEVLNLAQSKNFHLRPRDLISNINVIVLELKGSETTFMCEYADETATIVEFLNRWITFCQSIISTLT

SEQ ID NO: 195 - protein, 133 aa, Artificial sequence
  synthetic sequence
  Misc_feature (20)..(20): any amino acid other than aspartic acid
  Misc_feature (42)..(42): any amino acid other than phenylalanine
  Misc_feature (45)..(45): any amino acid other than tyrosine
  Misc_feature (126)..(126): any amino acid other than glutamine
APTSSSTKKTQLQLEHLLLXLQMILNGINNYKNPKLTRMLTXKFXMPKKATELKHLQCLEEELKPLEEVLNLAQSKNFHLRPRDLISNINVIVLELKGSETTFMCEYADETATIVEFLNRWITFCXSIISTLT

SEQ ID NO: 196 - protein, 133 aa, Artificial sequence
  synthetic sequence
  Misc_feature (16)..(16): any amino acid other than histidine
  Misc_feature (20)..(20): any amino acid other than aspartic acid
  Misc_feature (42)..(42): any amino acid other than phenylalanine
  Misc_feature (45)..(45): any amino acid other than tyrosine
  Misc_feature (126)..(126): any amino acid other than glutamine
APTSSSTKKTQLQLEXLLLXLQMILNGINNYKNPKLTRMLTXKFXMPKKATELKHLQCLEEELKPLEEVLNLAQSKNFHLRPRDLISNINVIVLELKGSETTFMCEYADETATIVEFLNRWITFCXSIISTLT

SEQ ID NO: 197 - protein, 133 aa, Artificial sequence
  synthetic sequence
  Misc_feature (16)..(16): any amino acid other than histidine
  Misc_feature (42)..(42): any amino acid other than phenylalanine
  Misc_feature (126)..(126): any amino acid other than glutamine
APTSSSTKKTQLQLEXLLLDLQMILNGINNYKNPKLTRMLTXKFYMPKKATELKHLQCLEEELKPLEEVLNLAQSKNFHLRPRDLISNINVIVLELKGSETTFMCEYADETATIVEFLNRWITFCXSIISTLT

SEQ ID NO: 198 - protein, 276 aa, Artificial sequence
  synthetic sequence
GSHSMRYFFTSVSRPGRGEPRFIAVGYVDDTQFVRFDSDAASQKMEPRAPWIEQEGPEYWDQETRNMKAHSQTDRANLGTLRGYYNQSEDGSHTIQIMYGCDVGPDGRFLRGYRQDAYDGKDYIALNEDLRSWTAADMAAQITKRKWEAVHAAEQRRVYLEGRCVDGLRRYLENGKETLQRTDPPKTHMTHHPISDHEATLRCWALGFYPAEITLTWQRDGEDQTQDTELVETRPAGDGTFQKWAAVVVPSGEEQRYTCHVQHEGLPKPLTLRWEL

SEQ ID NO: 199 - protein, 276 aa, Artificial sequence [sequence omitted]

SEQ ID NO: 200 - protein, 276 aa, Artificial sequence
  synthetic sequence
GSHSMRYFFTSVSRPGRGEPRFIAVGYVDDTQFVRFDSDAASQRMEPRAPWIEQEGPEYWDQETRNVKAQSQTDRVDLGTLRGYYNQSEAGSHTIQIMYGCDVGSDGRFLRGYRQDAYDGKDYIALNEDLRSWTAADMAAQITKRKWEAAHEAEQLRAYLDGTCVEWLRRYLENGKETLQRTDPPKTHMTHHPISDHEATLRCWALGFYPAEITLTWQRDGEDQTQDTELVETRPAGDGTFQKWAAVVVPSGEEQRYTCHVQHEGLPKPLTLRWEL

SEQ ID NO: 201 - protein, 276 aa, Artificial sequence; identical to SEQ ID NO: 49
  synthetic sequence

SEQ ID NO: 202 - protein, 276 aa, Artificial sequence
  synthetic sequence
GSHSMRYFSTSVSRPGRGEPRFIAVGYVDDTQFVRFDSDAASQRMEPRAPWIEQEGPEYWDEETGKVKAHSQTDRENLRIALRYYNQSEAGSHTLQMMFGCDVGSDGRFLRGYHQYAYDGKDYIALKEDLRSWTAADMAAQITQRKWEAARVAEQLRAYLEGTCVDGLRRYLENGKETLQRTDPPKTHMTHHPISDHEATLRCWALGFYPAEITLTWQRDGEDQTQDTELVETRPAGDGTFQKWAAVVVPSGEEQRYTCHVQHEGLPKPLTLRWEP

SEQ ID NO: 203 - protein, 276 aa, Artificial sequence; identical to SEQ ID NO: 50
  synthetic sequence

SEQ ID NO: 204 - protein, 276 aa, Artificial sequence
  synthetic sequence
GSHSMRYFSTSVSRPGRGEPRFIAVGYVDDTQFVRFDSDAASQRMEPRAPWIEQEGPEYWDEETGKVKAQSQTDRENLRIALRYYNQSEAGSHTLQMMFGCDVGSDGRFLRGYHQYAYDGKDYIALKEDLRSWTAADMAAQITKRKWEAAHVAEQQRAYLEGTCVDGLRRYLENGKETLQRTDPPKTHMTHHPISDHEATLRCWALGFYPAEITLTWQRDGEDQTQDTELVETRPAGDGTFQKWAAVVVPSGEEQRYTCHVQHEGLPKPLTLRWEP

SEQ ID NO: 205 - protein, 276 aa, Artificial sequence; identical to SEQ ID NO: 51
  synthetic sequence

SEQ ID NO: 206 - protein, 276 aa, Artificial sequence
  synthetic sequence
GSHSMRYFYTSVSRPGRGEPRFIAVGYVDDTQFVRFDSDAASQRMEPRAPWIEQEGPEYWDRNTRKVKAQSQTDRVDLGTLRGYYNQSEDGSHTIQRMYGCDVGPDGRFLRGYQQDAYDGKDYIALNEDLRSWTAADMAAQITQRKWETAHEAEQWRAYLEGTCVEWLRRYLENGKETLQRTDAPKTHMTHHAVSDHEATLRCWALSFYPAEITLTWQRDGEDQTQDTELVETRPAGDGTFQKWASVVVPSGQEQRYTCHVQHEGLPKPLTLRWEP

SEQ ID NO: 207 - protein, 276 aa, Artificial sequence [sequence omitted]

SEQ ID NO: 208 - protein, 276 aa, Artificial sequence
  synthetic sequence
GSHSMRYFDTAMSRPGRGEPRFISVGYVDDTQFVRFDSDAASPREEPRAPWIEQEGPEYWDRNTQIFKTNTQTDRESLRNLRGYYNQSEAGSHTLQSMYGCDVGPDGRLLRGHNQYAYDGKDYIALNEDLRSWTAADTAAQITQRKWEAARVAEQDRAYLEGTCVEWLRRYLENGKDTLERADPPKTHVTHHPISDHEATLRCWALGFYPAEITLTWQRDGEDQTQDTELVETRPAGDRTFQKWAAVVVPSGEEQRYTCHVQHEGLPKPLTLRWEP

SEQ ID NO: 209 - protein, 276 aa, Artificial sequence
  synthetic sequence
GSHSMRYFYTAMSRPGRGEPRFIAVGYVDDTQFVRFDSDAASPRMAPRAPWIEQEGPEYWDRNTQISKTNTQTYRESLRNLRGYYNQSEAGSHIIQRMYGCDVGPDGRLLRGYDQSAYDGKDYIALNEDLSSWTAADTAAQITQRKWEAAREAEQLRAYLEGLCVEWLRRYLENGKETLQRADPPKTHVTHHPISDHEATLRCWALGFYPAEITLTWQRDGEDQTQDTELVETRPAGDRTFQKWAAVVVPSGEEQRYTCHVQHEGLPKPLTLRWEP

SEQ ID NO: 210 - protein, 276 aa, Artificial sequence
  synthetic sequence
GSHSMRYFYTSVSRPGRGEPRFISVGYVDDTQFVRFDSDAASPREEPRAPWIEQEGPEYWDRNTQICKTNTQTYRENLRTALRYYNQSEAGSHTLQRMYGCDVGPDGRLLRGHNQFAYDGKDYIALNEDLSSWTAADTAAQITQRKWEAARVAEQLRTYLEGTCVEWLRRYLENGKETLQRADPPKTHVTHHPISDHEATLRCWALGFYPAEITLTWQRDGEDQTQDTELVETRPAGDRTFQKWAAVVVPSGEEQRYTCHVQHEGLPKPLTLRWEP

SEQ ID NO: 211 - protein, 276 aa, Artificial sequence
  synthetic sequence
GSHSMRYFHTAMSRPGRGEPRFITVGYVDDTLFVRFDSDATSPRKEPRAPWIEQEGPEYWDRETQISKTNTQTYRESLRNLRGYYNQSEAGSHTLQRMYGCDVGPDGRLLRGHNQYAYDGKDYIALNEDLRSWTAADTAAQISQRKLEAARVAEQLRAYLEGECVEWLRRYLENGKDKLERADPPKTHVTHHPISDHEATLRCWALGFYPAEITLTWQRDGEDQTQDTELVETRPAGDRTFQKWAAVVVPSGEEQRYTCHVQHEGLPKPLTLRWEP

SEQ ID NO: 212 - protein, 276 aa, Artificial sequence
  synthetic sequence
GSHSMRYFYTAMSRPGRGEPRFIAVGYVDDTQFVRFDSDAASPRMAPRAPWIEQEGPEYWDRETQKYKRQAQTDRVSLRNLRGYYNQSEAGSHTLQRMYGCDVGPDGRLLRGHDQSAYDGKDYIALNEDLSSWTAADTAAQITQRKWEAAREAEQWRAYLEGLCVEWLRRYLENGKETLQRADPPKTHVTHHPISDHEATLRCWALGFYPAEITLTWQRDGEDQTQDTELVETRPAGDRTFQKWAAVVVPSGEEQRYTCHVQHEGLPKPLTLRWEP

SEQ ID NO: 213 - protein, 276 aa, Artificial sequence
  synthetic sequence
GSHSMRYFYTAMSRPGRGEPRFIAVGYVDDTQFVRFDSDAASPRTEPRAPWIEQEGPEYWDRNTQIFKTNTQTYRENLRIALRYYNQSEAGSHIIQRMYGCDLGPDGRLLRGHDQSAYDGKDYIALNEDLSSWTAADTAAQITQRKWEAARVAEQLRAYLEGLCVEWLRRYLENGKETLQRADPPKTHVTHHPVSDHEATLRCWALGFYPAEITLTWQRDGEDQTQDTELVETRPAGDRTFQKWAAVVVPSGEEQRYTCHVQHEGLPKPLTLRWEP

SEQ ID NO: 214 - protein, 276 aa, Artificial sequence
  synthetic sequence
CSHSMKYFFTSVSRPGRGEPRFISVGYVDDTQFVRFDSDAASPRGEPRAPWVEQEGPEYWDRETQKYKRQAQTDRVSLRNLRGYYNQSEAGSHTLQWMCGCDLGPDGRLLRGYDQYAYDGKDYIALNEDLRSWTAADTAAQITQRKWEAAREAEQRRAYLEGTCVEWLRRYLENGKETLQRAEHPKTHVTHHPVSDHEATLRCWALGFYPAEITLTWQWDGEDQTQDTELVETRPAGDGTFQKWAAVMVPSGEEQRYTCHVQHEGLPEPLTLRWEP

SEQ ID NO: 215 - protein, 276 aa, Artificial sequence
  synthetic sequence
GSHSMRYFYTAVSRPGRGEPHFIAVGYVDDTQFVRFDSDAASPRGEPRAPWVEQEGPEYWDRETQKYKRQAQTDRVSLRNLRGYYNQSEARSHIIQRMYGCDVGPDGRLLRGYDQYAYDGKDYIALNEDLRSWTAADTAAQITQRKWEAAREAEQLRAYLEGLCVEWLRRYLKNGKETLQRAEHPKTHVTHHPVSDHEATLRCWALGFYPAEITLTWQWDGEDQTQDTELVETRPAGDGTFQKWAAVVVPSGEEQRYTCHVQHEGLPEPLTLRWEP

SEQ ID NO: 216 - protein, 276 aa, Artificial sequence
  synthetic sequence
GSHSMRYFYTAVSRPGRGEPHFIAVGYVDDTQFVRFDSDAASPRGEPRAPWVEQEGPEYWDRETQKYKRQAQTDRVSLRNLRGYYNQSEAGSHIIQRMYGCDVGPDGRLLRGYDQYAYDGKDYIALNEDLRSWTAADTAAQITQRKWEAAREAEQLRAYLEGLCVEWLRRYLKNGKETLQRAEHPKTHVTHHPVSDHEATLRCWALGFYPAEITLTWQWDGEDQTQDTELVETRPAGDGTFQKWAAVVVPSGEEQRYTCHVQHEGLPEPLTLRWEP

SEQ ID NO: 217 - protein, 276 aa, Artificial sequence
  synthetic sequence
GSHSMRYFSTSVSWPGRGEPRFIAVGYVDDTQFVRFDSDAASPRGEPREPWVEQEGPEYWDRETQKYKRQAQADRVNLRKLRGYYNQSEDGSHTLQRMFGCDLGPDGRLLRGYNQFAYDGKDYIALNEDLRSWTAADTAAQITQRKWEAAREAEQRRAYLEGTCVEWLRRYLENGKETLQRAEHPKTHVTHHPVSDHEATLRCWALGFYPAEITLTWQWDGEDQTQDTELVETRPAGDGTFQKWAAVVVPSGEEQRYTCHVQHEGLPEPLTLRWKP

SEQ ID NO: 218 - protein, 276 aa, Artificial sequence
  synthetic sequence
CSHSMRYFDTAVSRPGRGEPRFISVGYVDDTQFVRFDSDAASPRGEPRAPWVEQEGPEYWDRETQKYKRQAQADRVNLRKLRGYYNQSEDGSHTLQWMYGCDLGPDGRLLRGYDQSAYDGKDYIALNEDLRSWTAADTAAQITQRKWEAAREAEQWRAYLEGTCVEWLRRYLENGKETLQRAEHPKTHVTHHPVSDHEATLRCWALGFYPAEITLTWQRDGEDQTQDTELVETRPAGDGTFQKWAAVVVPSGEEQRYTCHVQHEGLPEPLTLRWEP

SEQ ID NO: 219 - protein, 276 aa, Artificial sequence
  synthetic sequence
CSHSMRYFDTAVSRPGRGEPRFISVGYVDDTQFVRFDSDAASPRGEPRAPWVEQEGPEYWDRETQNYKRQAQADRVSLRNLRGYYNQSEDGSHTLQRMYGCDLGPDGRLLRGYDQSAYDGKDYIALNEDLRSWTAADTAAQITQRKLEAARAAEQLRAYLEGTCVEWLRRYLENGKETLQRAEPPKTHVTHHPLSDHEATLRCWALGFYPAEITLTWQRDGEDQTQDTELVETRPAGDGTFQKWAAVVVPSGQEQRYTCHMQHEGLQEPLTLSWEP

SEQ ID NO: 220 - protein, 276 aa, Artificial sequence
  synthetic sequence
CSHSMRYFDTAVSRPGRGEPRFISVGYVDDTQFVRFDSDAASPRGEPRAPWVEQEGPEYWDRETQKYKRQAQADRVSLRNLRGYYNQSEDGSHTLQRMSGCDLGPDGRLLRGYDQSAYDGKDYIALNEDLRSWTAADTAAQITQRKLEAARAAEQLRAYLEGTCVEWLRRYLENGKETLQRAEPPKTHVTHHPLSDHEATLRCWALGFYPAEITLTWQRDGEDQTQDTELVETRPAGDGTFQKWAAVVVPSGQEQRYTCHMQHEGLQEPLTLSWEP

SEQ ID NO: 221 - protein, 276 aa, Artificial sequence
  synthetic sequence
CSHSMRYFYTAVSRPGRGEPRFIAVGYVDDTQFVQFDSDAASPRGEPRAPWVEQEGPEYWDRETQKYKRQAQTDRVSLRNLRGYYNQSEAGSHTLQRMYGCDLGPDGRLLRGYNQFAYDGKDYIALNEDLRSWTAADTAAQITQRKWEAARTAEQLRAYLEGTCVEWLRRYLENGKKTLQRAEHPKTHVTHHPVSDHEATLRCWALGFYPAEITLTWQRDGEDQTQDTELVETRPAGDGTFQKWAAVVVPSGEEQRYTCHVQHEGLPEPLTLRWGP

SEQ ID NO: 222 - protein, 276 aa, Artificial sequence
  synthetic sequence
CSHSMRYFYTAVSRPGRGEPHFIAVGYVDDTQFVRFDSDAASPRGEPRAPWVEQEGPEYWDRETQNYKRQAQTDRVNLRKLRGYYNQSEAGSHIIQRMYGCDLGPDGRLLRGHDQLAYDGKDYIALNEDLRSWTAADTAAQITQRKWEAAREAEQLRAYLEGTCVEWLRRYLENGKETLQRAEHPKTHVTHHPVSDHEATLRCWALGFYPAEITLTWQRDGEDQTQDTELVETRPAGDGTFQKWAAVVVPSGEEQRYTCHVQHEGLPEPLTLRWEP

SEQ ID NO: 223 - protein, 15 aa, Artificial sequence
  synthetic sequence
CMTWNQMNLGATLKG

SEQ ID NO: 224 - protein, 15 aa, Artificial sequence
  synthetic sequence
WNQMNLGATLKGVAA

SEQ ID NO: 225 - protein, 15 aa, Artificial sequence
  synthetic sequence
CMTWNYMNLGATLKG

SEQ ID NO: 226 - protein, 15 aa, Artificial sequence
  synthetic sequence
WNYMNLGATLKGVAA

SEQ ID NO: 227 - protein, 15 aa, Artificial sequence
  synthetic sequence
MTWNQMNLGATLKGV

SEQ ID NO: 228 - protein, 15 aa, Artificial sequence
  synthetic sequence
TWNQMNLGATLKGVA

SEQ ID NO: 229 - protein, 15 aa, Artificial sequence
  synthetic sequence
CMTWNLMNLGATLKG

SEQ ID NO: 230 - protein, 15 aa, Artificial sequence
  synthetic sequence
MTWNLMNLGATLKGV

SEQ ID NO: 231 - protein, 15 aa, Artificial sequence
  synthetic sequence
TWNLMNLGATLKGVA

SEQ ID NO: 232 - protein, 15 aa, Artificial sequence
  synthetic sequence
WNLMNLGATLKGVAA

SEQ ID NO: 233 - protein, 8 aa, Artificial sequence
  synthetic sequence
MNLGATLK

SEQ ID NO: 234 - protein, 15 aa, Artificial sequence
  synthetic sequence
MTWNYMNLGATLKGV

SEQ ID NO: 235 - protein, 15 aa, Artificial sequence
  synthetic sequence
TWNYMNLGATLKGVA

SEQ ID NO: 236 - protein, 17 aa, Artificial sequence
  synthetic sequence
CMTWNQMNLGATLKGVA

SEQ ID NO: 237 - protein, 17 aa, Artificial sequence
  synthetic sequence
CMTWNLMNLGATLKGVA

SEQ ID NO: 238 - protein, 17 aa, Artificial sequence
  synthetic sequence
CMTWNYMNLGATLKGVA

SEQ ID NO: 239 - protein, 9 aa, Artificial sequence
  synthetic sequence
GYLRNPTAC

SEQ ID NO: 240 - protein, 9 aa, Artificial sequence
  synthetic sequence
GALRNPTAL

SEQ ID NO: 241 - protein, 9 aa, Artificial sequence
  synthetic sequence
YALRNPTAC

SEQ ID NO: 242 - protein, 9 aa, Artificial sequence
  synthetic sequence
GLLRNPTAC

SEQ ID NO: 243 - protein, 9 aa, Artificial sequence
  synthetic sequence
RYRPHPGAL

SEQ ID NO: 244 - protein, 9 aa, Artificial sequence
  synthetic sequence
YQRPHPGAL

SEQ ID NO: 245 - protein, 9 aa, Artificial sequence
  synthetic sequence
RLRPHPGAL

SEQ ID NO: 246 - protein, 9 aa, Artificial sequence
  synthetic sequence
RIRPHPGAL

SEQ ID NO: 247 - protein, 15 aa, Artificial sequence
  synthetic sequence
QFPNHSFKHEDPMGQ

SEQ ID NO: 248 - protein, 9 aa, Artificial sequence
  synthetic sequence
HSFKHEDPY

SEQ ID NO: 249 - protein, 13 aa, Artificial sequence
  synthetic sequence
QFPNHSFKHEDPM

SEQ ID NO: 250 - protein, 13 aa, Artificial sequence
  synthetic sequence
QFPNHSFKHEDPY

SEQ ID NO: 251 - protein, 13 aa, Artificial sequence
  synthetic sequence
KRPFMCAYPGCNK

SEQ ID NO: 252 - protein, 13 aa, Artificial sequence
  synthetic sequence
KRPFMCAYPGCYK

SEQ ID NO: 253 - protein, 9 aa, Artificial sequence
  synthetic sequence
FMCAYPGCY

SEQ ID NO: 254 - protein, 9 aa, Artificial sequence
  synthetic sequence
FMCAYPGCK

SEQ ID NO: 255 - protein, 15 aa, Artificial sequence
  synthetic sequence
KRPFMCAYPGCNKRY

SEQ ID NO: 256 - protein, 15 aa, Artificial sequence
  synthetic sequence
SEKRPFMCAYPGCNK

SEQ ID NO: 257 - protein, 15 aa, Artificial sequence
  synthetic sequence
KRPFMCAYPGCYKRY

SEQ ID NO: 258 - protein, 9 aa, Artificial sequence
  synthetic sequence
NLMNLGATL

SEQ ID NO: 259 - protein, 9 aa, Artificial sequence
  synthetic sequence
VLDFAPPGA

SEQ ID NO: 260 - protein, 9 aa, Artificial sequence
  synthetic sequence
RMFPNAPYL

SEQ ID NO: 261 - protein, 8 aa, Artificial sequence
  synthetic sequence
CMTWNQMN

SEQ ID NO: 262 - protein, 9 aa, Artificial sequence
  synthetic sequence
CYTWNQMNL

SEQ ID NO: 263 - protein, 9 aa, Artificial sequence
  synthetic sequence
NYMNLGATL

SEQ ID NO: 264 - protein, 9 aa, Artificial sequence
  synthetic sequence
YMFPNAPYL

SEQ ID NO: 265 - protein, 9 aa, Artificial sequence
  synthetic sequence
SLGEQQYSV

SEQ ID NO: 266 - protein, 9 aa, Artificial sequence
  synthetic sequence
CMTWNQMNL

SEQ ID NO: 267 - protein, 9 aa, Artificial sequence
  synthetic sequence
NQMNLGATL

SEQ ID NO: 268 - protein, 8 aa, Artificial sequence
  synthetic sequence
CMTWNQMN

SEQ ID NO: 269 - protein, 9 aa, Artificial sequence
  synthetic sequence
CYTWNQMNL

SEQ ID NO: 270 - protein, 9 aa, Artificial sequence
  synthetic sequence
NYMNLGATL

SEQ ID NO: 271 - protein, 9 aa, Artificial sequence
  synthetic sequence
YPYDVPDYA

SEQ ID NO: 272 - protein, 8 aa, Artificial sequence
  synthetic sequence
DYKDDDDK

SEQ ID NO: 273 - protein, 10 aa, Artificial sequence
  synthetic sequence
EQKLISEEDL

SEQ ID NO: 274 - protein, 5 aa, Artificial sequence
  synthetic sequence
HHHHH

SEQ ID NO: 275 - protein, 6 aa, Artificial sequence
  synthetic sequence
HHHHHH

SEQ ID NO: 276 - protein, 10 aa, Artificial sequence
  synthetic sequence
EQKLISEEDL

SEQ ID NO: 277 - protein, 8 aa, Artificial sequence
  synthetic sequence
DYKDDDDK

SEQ ID NO: 278 - protein, 8 aa, Artificial sequence
  synthetic sequence
WSHPQFEK

SEQ ID NO: 279 - protein, 9 aa, Artificial sequence
  synthetic sequence
YPYDVPDYA

SEQ ID NO: 280 - protein, 5 aa, Artificial sequence
  synthetic sequence
RYIRS

SEQ ID NO: 281 - protein, 4 aa, Artificial sequence
  synthetic sequence
FHHT

SEQ ID NO: 282 - protein, 17 aa, Artificial sequence
  synthetic sequence
WEAAAREACCRECCARA

SEQ ID NO: 283 - protein, 5 aa, Artificial sequence
  synthetic sequence
AAAGG

SEQ ID NO: 284 - protein, 5 aa, Artificial sequence
  synthetic sequence
  MISC_FEATURE (1)..(4): The residues from positions 1 to 4 may be repeated 1 to 10 times
GGGGS

SEQ ID NO: 285 - protein, 8 aa, Artificial sequence
  synthetic sequence
CMTWNQMN

SEQ ID NO: 286 - protein, 9 aa, Artificial sequence
  synthetic sequence
CYTWNQMNL

SEQ ID NO: 287 - protein, 5 aa, Artificial sequence
  synthetic sequence
GTLRG

SEQ ID NO: 288 - protein, 5 aa, Artificial sequence
  synthetic sequence
YNQSE

SEQ ID NO: 289 - protein, 5 aa, Artificial sequence
  synthetic sequence
TAADM

SEQ ID NO: 290 - protein, 5 aa, Artificial sequence
  synthetic sequence
AQTTK

SEQ ID NO: 291 - protein, 5 aa, Artificial sequence
  synthetic sequence
VETRP

SEQ ID NO: 292 - protein, 5 aa, Artificial sequence
  synthetic sequence
GDGTF

SEQ ID NO: 293 - protein, 5 aa, Artificial sequence
  synthetic sequence
RNLRG

SEQ ID NO: 294 - protein, 5 aa, Artificial sequence
  synthetic sequence
TAADT

SEQ ID NO: 295 - protein, 5 aa, Artificial sequence
  synthetic sequence
AQITQ

SEQ ID NO: 296 - protein, 5 aa, Artificial sequence
  synthetic sequence
GDRTF

SEQ ID NO: 297 - protein, 276 aa, Homo sapiens [sequence omitted]

SEQ ID NO: 298 - protein, 276 aa, Artificial sequence; identical to SEQ ID NO: 48
  synthetic sequence

SEQ ID NO: 299 - protein, 276 aa, Artificial sequence
  synthetic sequence
GSHSMRYFFTSVSRPGRGEPRFIAVGYVDDTQFVRFDSDAASQRMEPRAPWIEQEGPEYWDGETRKVKAHSQTHRVDLGTLRGCYNQSEAGSHTVQRMYGCDVGSDWRFLRGYHQYAYDGKDYIALKEDLRSWTAADMCAQTTKHKWEAAHVAEQLRAYLEGTCVEWLRRYLENGKETLQRTDAPKTHMTHHAVSDHEATLRCWALSFYPAEITLTWQRDGEDQTQDTELVETRPAGDGTFQKWAAVVVPSGQEQRYTCHVQHEGLPKPLTLRWEP

SEQ ID NO: 300 - protein, 275 aa, Homo sapiens
GSHSMRYFYTSVSRPGRGEPRFIAVGYVDDTQFVRFDSDAASQRMEPRAPWIEQEGPEYWDQETRNVKAQSQTDRVDLGTLRGYYNQSEDGSHTIQIMYGCDVGPDGRFLRGYRQDAYDGKDYIALNEDLRSWTAADMAAQITKRKWEAAHAAEQQRAYLEGTCVEWLRRYLENGKETLQRTDPPKTHMTHHPISDHEATLRCWALGFYPAEITLTWQRDGEDQTQDTELVETRPAGDGTFQKWAAVVVPSGEEQRYTCHVQHEGLPKPLTLRWE

SEQ ID NO: 301 - protein, 275 aa, Artificial sequence
  synthetic sequence
GSHSMRYFYTSVSRPGRGEPRFIAVGYVDDTQFVRFDSDAASQRMEPRAPWIEQEGPEYWDQETRNVKAQSQTDRVDLGTLRGAYNQSEDGSHTIQIMYGCDVGPDGRFLRGYRQDAYDGKDYIALNEDLRSWTAADMAAQITKRKWEAAHAAEQQRAYLEGTCVEWLRRYLENGKETLQRTDPPKTHMTHHPISDHEATLRCWALGFYPAEITLTWQRDGEDQTQDTELVETRPCGDGTFQKWAAVVVPSGEEQRYTCHVQHEGLPKPLTLRWE

SEQ ID NO: 302 - protein, 341 aa, Homo sapiens
GSHSMRYFSTSVSRPGRGEPRFIAVGYVDDTQFVRFDSDAASQRMEPRAPWIEQEGPEYWDEETGKVKAHSQTDRENLRIALRYYNQSEAGSHTLQMMFGCDVGSDGRFLRGYHQYAYDGKDYIALKEDLRSWTAADMAAQITKRKWEAAHVAEQQRAYLEGTCVDGLRRYLENGKETLQRTDPPKTHMTHHPISDHEATLRCWALGFYPAEITLTWQRDGEDQTQDTELVETRPAGDGTFQKWAAVVVPSGEEQRYTCHVQHEGLPKPLTLRWEPSSQPTVPIVGIIAGLVLLGAVITGAVVAAVMWRRNSSDRKGGSYSQAASSDSAQGSDVSLTACKV

SEQ ID NO: 303 - protein, 341 aa, Homo sapiens
GSHSMRYFTTSVSRPGRGEPRFIAVGYVDDTQFVRFDSDAASQRMEPRAPWIEQEGPEYWDRNTRNVKAHSQIDRVDLGTLRGYYNQSEAGSHTIQMMYGCDVGSDGRFLRGYQQDAYDGKDYIALNEDLRSWTAADMAAQITQRKWEAARVAEQLRAYLEGTCVEWLRRYLENGKETLQRTDPPKTHMTHHAVSDHEATLRCWALSFYPAEITLTWQRDGEDQTQDTELVETRPAGDGTFQKWASVVVPSGQEQRYTCHVQHEGLPKPLTLRWEPSSQPTIPIVGIIAGLVLFGAVFAGAVVAAVRWRRKSSDRKGGSYSQAASSDSAQGSDMSLTACKV

SEQ ID NO: 304 - protein, 276 aa, Homo sapiens [sequence omitted]

SEQ ID NO: 305 - protein, 276 aa, Artificial sequence
  synthetic sequence
GSHSMRYFYTSVSRPGRGEPRFISVGYVDDTQFVRFDSDAASPREEPRAPWIEQEGPEYWDRNTQIYKAQAQTDRESLRNLRGAYNQSEAGSHTLQSMYGCDVGPDGRLLRGHDQYAYDGKDYIALNEDLRSWTAADTAAQITQRKWEAAREAEQRRAYLEGECVEWLRRYLENGKDKLERADPPKTHVTHHPISDHEATLRCWALGFYPAEITLTWQRDGEDQTQDTELVETRPCGDRTFQKWAAVVVPSGEEQRYTCHVQHEGLPKPLTLRWEP

SEQ ID NO: 306 - protein, 276 aa, Artificial sequence
  synthetic sequence
GSHSMRYFYTSVSRPGRGEPRFISVGYVDDTQFVRFDSDAASPREEPRAPWIEQEGPEYWDRNTQIYKAQAQTDRESLRNLRGCYNQSEAGSHTLQSMYGCDVGPDGRLLRGHDQYAYDGKDYIALNEDLRSWTAADTCAQITQRKWEAAREAEQRRAYLEGECVEWLRRYLENGKDKLERADPPKTHVTHHPISDHEATLRCWALGFYPAEITLTWQRDGEDQTQDTELVETRPAGDRTFQKWAAVVVPSGEEQRYTCHVQHEGLPKPLTLRWEP

SEQ ID NO: 307 - protein, 276 aa, Homo sapiens; identical to SEQ ID NO: 219

SEQ ID NO: 308 - protein, 276 aa, Homo sapiens
CSHSMRYFDTAVSRPGRGEPRFISVGYVDDTQFVRFDSDAASPRGEPRAPWVEQEGPEYWDRETQNYKRQAQADRVSLRNLRGAYNQSEDGSHTLQRMYGCDLGPDGRLLRGYDQSAYDGKDYIALNEDLRSWTAADTAAQITQRKLEAARAAEQLRAYLEGTCVEWLRRYLENGKETLQRAEPPKTHVTHHPLSDHEATLRCWALGFYPAEITLTWQRDGEDQTQDTELVETRPCGDGTFQKWAAVVVPSGQEQRYTCHMQHEGLQEPLTLSWEP

SEQ ID NO: 309 - protein, 246 aa, Artificial sequence
  synthetic sequence
  MISC_FEATURE (78)..(79): Amino acid cluster 1 is present between the residues at positions 78 and 79.
  MISC_FEATURE (79)..(79): The cysteine residue forms a disulfide bond between the alpha1 and alpha2-1 helices.
  MISC_FEATURE (79)..(80): Amino acid cluster 2 is present between the residues at positions 79 and 80.
  MISC_FEATURE (123)..(124): Amino acid cluster 3 is present between the residues at positions 123 and 124.
  MISC_FEATURE (124)..(124): The cysteine residue at position 124 forms a disulfide bond between the alpha1 and alpha2-1 helices
  MISC_FEATURE (124)..(125): Amino acid cluster 4 is present between the residues at positions 124 and 125.
  MISC_FEATURE (210)..(211): Amino acid cluster 5 is present between the residues at positions 210 and 211.
  MISC_FEATURE (211)..(211): The cysteine residue forms a disulfide bond with the beta2M polypeptide cysteine at position 12.
  MISC_FEATURE (211)..(212): Amino acid cluster 6 is present between the residues at positions 211 and 212.
  MISC_FEATURE (212)..(213): Amino acid cluster 6 is present between the residues at positions 211 and 212.
GSHSMRYFFTSVSRPGRGEPRFIAVGYVDDTQFVRFDSDAASQRMEPRAPWIEQEGPEYWDGETRKVKAHSQTHRVDLCAGSHTVQRMYGCDVGSDWRFLRGYHQYAYDGKDYIALKEDLRSWCHKWEAAHVAEQLRAYLEGTCVEWLRRYLENGKETLQRTDAPKTHMTHHAVSDHEATLRCWALSFYPAEITLTWQRDGEDQTQDTELCQKWAAVVVPSGQEQRYTCHVQHEGLPKPLTLRWEP

SEQ ID NO: 310 - protein, 99 aa, Artificial sequence [sequence omitted]

SEQ ID NO: 311 - protein, 99 aa, Artificial sequence
  synthetic sequence
IQRTPKIQVYSCHPAENGKSNFLNCYVSGFHPSDIEVDLLKNGERIEKVEHSDLSFSKDWSFYLLYYTEFTPTEKDEYACRVNHVTLSQPKIVKWDRDM

SEQ ID NO: 312 - protein, 276 aa, Artificial sequence
  synthetic sequence
GSHSMRYFFTSVSRPGRGEPRFIAVGYVDDTQFVRFDSDAASQRMEPRAPWIEQEGPEYWDGETRKVKAHSQTHRVDLGTLRGYYNQSEAGSHTVQRMYGCDVGSDWRFLRGYHQYAYDGKDYIALKEDLRSWTAADMAAQTTKHKWEAAHVAEQLRAYLEGTCVEWLRRYLENGKETLQRTDAPKTHMTHHAVSDHEATLRCWALSFYPAEITLTWQRDGEDQTQDTELVETRPCGDGTFQKWAAVVVPSGQEQRYTCHVQHEGLPKPLTLRWEP

SEQ ID NO: 313 - protein, 275 aa, Artificial sequence; identical to SEQ ID NO: 46
  synthetic sequence

SEQ ID NO: 314 - protein, 99 aa, Artificial sequence; identical to SEQ ID NO: 311
  synthetic sequence

SEQ ID NO: 315 - protein, 10 aa, Artificial sequence
  synthetic sequence
  MISC_FEATURE (6)..(10): The amino acids from positions 6 to 10 may be repeated 1, 2, 3, 4, 5, 6, 7, 8, or 9 times
GCGGSGGGGS

SEQ ID NO: 316 - protein, 20 aa, Artificial sequence
  synthetic sequence
GCGGSGGGGSGGGGSGGGGS

SEQ ID NO: 317 - protein, 15 aa, Artificial sequence
  synthetic sequence
GCGGSGGGGSGGGGS

SEQ ID NO: 318 - protein, 5 aa, Artificial sequence
  synthetic sequence
GCGGS

SEQ ID NO: 319 - protein, 10 aa, Artificial sequence
  synthetic sequence
  MISC_FEATURE (6)..(10): The amino acids at positions 6 to 10 may be repeated 1 to 10 times
GCGGSGGGGS

SEQ ID NO: 320 - protein, 15 aa, Artificial sequence
  synthetic sequence
GCGGSGGGGSGGGGS

SEQ ID NO: 321 - protein, 20 aa, Artificial sequence
  synthetic sequence
GCGGSGGGGSGGGGSGGGGS

SEQ ID NO: 322 - protein, 25 aa, Artificial sequence
  synthetic sequence
GCGGSGGGGSGGGGSGGGGSGGGGS

SEQ ID NO: 323 - protein, 30 aa, Artificial sequence
  synthetic sequence
GCGGSGGGGSGGGGSGGGGSGGGGSGGGGS

SEQ ID NO: 324 - protein, 35 aa, Artificial sequence
  synthetic sequence
GCGGSGGGGSGGGGSGGGGSGGGGSGGGGSGGGGS

SEQ ID NO: 325 - protein, 40 aa, Artificial sequence
  synthetic sequence
GCGGSGGGGSGGGGSGGGGSGGGGSGGGGSGGGGSGGGGS

SEQ ID NO: 326 - protein, 45 aa, Artificial sequence
  synthetic sequence
GCGGSGGGGSGGGGSGGGGSGGGGSGGGGSGGGGSGGGGSGGGGS

SEQ ID NO: 327 - protein, 50 aa, Artificial sequence
  synthetic sequence
GCGGSGGGGSGGGGSGGGGSGGGGSGGGGSGGGGSGGGGSGGGGSGGGGS

SEQ ID NO: 328 - protein, 55 aa, Artificial sequence
  synthetic sequence
GCGGSGGGGSGGGGSGGGGSGGGGSGGGGSGGGGSGGGGSGGGGSGGGGSGGGGS

SEQ ID NO: 329 - protein, 5 aa, Artificial sequence
  synthetic sequence
CGGGS

SEQ ID NO: 330 - protein, 10 aa, Artificial sequence
  synthetic sequence
  MISC_FEATURE (6)..(10): The amino acids at positions 6 to 10 can be repeated 1 to 10 times
CGGGSGGGGS

SEQ ID NO: 331 - protein, 10 aa, Artificial sequence
  synthetic sequence
CGGGSGGGGS

SEQ ID NO: 332 - protein, 15 aa, Artificial sequence
  synthetic sequence
CGGGSGGGGSGGGGS

SEQ ID NO: 333 - protein, 20 aa, Artificial sequence
  synthetic sequence
CGGGSGGGGSGGGGSGGGGS

SEQ ID NO: 334 - protein, 25 aa, Artificial sequence
  synthetic sequence
CGGGSGGGGSGGGGSGGGGSGGGGS

SEQ ID NO: 335 - protein, 30 aa, Artificial sequence
  synthetic sequence
CGGGSGGGGSGGGGSGGGGSGGGGSGGGGS

SEQ ID NO: 336 - protein, 35 aa, Artificial sequence
  synthetic sequence
CGGGSGGGGSGGGGSGGGGSGGGGSGGGGSGGGGS

SEQ ID NO: 337 - protein, 40 aa, Artificial sequence
  synthetic sequence
CGGGSGGGGSGGGGSGGGGSGGGGSGGGGSGGGGSGGGGS

SEQ ID NO: 338 - protein, 45 aa, Artificial sequence
  synthetic sequence
CGGGSGGGGSGGGGSGGGGSGGGGSGGGGSGGGGSGGGGSGGGGS

SEQ ID NO: 339 - protein, 50 aa, Artificial sequence
  synthetic sequence
CGGGSGGGGSGGGGSGGGGSGGGGSGGGGSGGGGSGGGGSGGGGSGGGGS

SEQ ID NO: 340 - protein, 55 aa, Artificial sequence
  synthetic sequence
CGGGSGGGGSGGGGSGGGGSGGGGSGGGGSGGGGSGGGGSGGGGSGGGGSGGGGS

SEQ ID NO: 341 - protein, 276 aa, Artificial sequence
  synthetic sequence
GSHSMRYFFTSVSRPGRGEPRFIAVGYVDDTQFVRFDSDAASQRMEPRAPWIEQEGPEYWDGETRKVKAHSQTHRVDLGTLRGCYNQSEAGSHTVQRMYGCDVGSDWRFLRGYHQYAYDGKDYIALKEDLRSWTAADMAAQTTKHKWEAAHVAEQLRAYLEGTCVEWLRRYLENGKETLQRTDAPKTHMTHHAVSDHEATLRCWALSFYPAEITLTWQRDGEDQTQDTELVETRPCGDGTFQKWAAVVVPSGQEQRYTCHVQHEGLPKPLTLRWEP

SEQ ID NO: 342 - protein, 10 aa, Artificial sequence
  synthetic sequence
  MISC_FEATURE (6)..(10): The residues from positions 6 to 10 may be repeated 1 to 10 times
GCGGSGGGGS

SEQ ID NO: 343 - protein, 275 aa, Artificial sequence
  synthetic sequence
GSHSMRYFFTSVSRPGRGEPRFIAVGYVDDTQFVRFDSDAASQKMEPRAPWIEQEGPEYWDQETRNMKAHSQTDRANLGTLRGCYNQSEDGSHTIQIMYGCDVGPDGRFLRGYRQDAYDGKDYIALNEDLRSWTAADMAAQITKRKWEAVHAAEQRRVYLEGRCVDGLRRYLENGKETLQRTDPPKTHMTHHPISDHEATLRCWALGFYPAEITLTWQRDGEDQTQDTELVETRPCGDGTFQKWAAVVVPSGEEQRYTCHVQHEGLPKPLTLRWE

SEQ ID NO: 344 - protein, 275 aa, Artificial sequence
  synthetic sequence
GSHSMRYFYTSVSRPGRGEPRFIAVGYVDDTQFVRFDSDAASQRMEPRAPWIEQEGPEYWDQETRNVKAQSQTDRVDLGTLRGCYNQSEDGSHTIQIMYGCDVGPDGRFLRGYRQDAYDGKDYIALNEDLRSWTAADMAAQITKRKWEAAHAAEQQRAYLEGRCVEWLRRYLENGKETLQRTDPPKTHMTHHPISDHEATLRCWALGFYPAEITLTWQRDGEDQTQDTELVETRPCGDGTFQKWAAVVVPSGEEQRYTCHVQHEGLPKPLTLRWE

SEQ ID NO: 345 - protein, 275 aa, Artificial sequence
  synthetic sequence
GSHSMRYFSTSVSRPGRGEPRFIAVGYVDDTQFVRFDSDAASQRMEPRAPWIEQEGPEYWDEETGKVKAHSQTDRENLRIALRCYNQSEAGSHTLQMMFGCDVGSDGRFLRGYHQYAYDGKDYIALKEDLRSWTAADMAAQITQRKWEAARVAEQLRAYLEGTCVDGLRRYLENGKETLQRTDPPKTHMTHHPISDHEATLRCWALGFYPAEITLTWQRDGEDQTQDTELVETRPCGDGTFQKWAAVVVPSGEEQRYTCHVQHEGLPKPLTLRWE

SEQ ID NO: 346 - protein, 275 aa, Artificial sequence
  synthetic sequence
GSHSMRYFSTSVSRPGRGEPRFIAVGYVDDTQFVRFDSDAASQRMEPRAPWIEQEGPEYWDEETGKVKAHSQTDRENLRIALRCYNQSEAGSHTLQMMFGCDVGSDGRFLRGYHQYAYDGKDYIALKEDLRSWTAADMAAQITKRKWEAAHVAEQQRAYLEGTCVDGLRRYLENGKETLQRTDPPKTHMTHHPISDHEATLRCWALGFYPAEITLTWQRDGEDQTQDTELVETRPCGDGTFQKWAAVVVPSGEEQRYTCHVQHEGLPKPLTLRWE

SEQ ID NO: 347 - protein, 275 aa, Artificial sequence
  synthetic sequence
GSHSMRYFSTSVSRPGRGEPRFIAVGYVDDTQFVRFDSDAASQRMEPRAPWIEQEGPEYWDEETGKVKAQSQTDRENLRIALRCYNQSEAGSHTLQMMFGCDVGSDGRFLRGYHQYAYDGKDYIALKEDLRSWTAADMAAQITKRKWEAAHVAEQQRAYLEGTCVDGLRRYLENGKETLQRTDPPKTHMTHHPISDHEATLRCWALGFYPAEITLTWQRDGEDQTQDTELVETRPCGDGTFQKWAAVVVPSGEEQRYTCHVQHEGLPKPLTLRWE

SEQ ID NO: 348 - protein, 275 aa, Artificial sequence
  synthetic sequence
GSHSMRYFTTSVSRPGRGEPRFIAVGYVDDTQFVRFDSDAASQRMEPRAPWIEQEGPEYWDRNTRNVKAHSQIDRVDLGTLRGCYNQSEAGSHTIQMMYGCDVGSDGRFLRGYQQDAYDGKDYIALNEDLRSWTAADMAAQITQRKWEAARVAEQLRAYLEGTCVEWLRRYLENGKETLQRTDPPKTHMTHHAVSDHEATLRCWALSFYPAEITLTWQRDGEDQTQDTELVETRPCGDGTFQKWASVVVPSGQEQRYTCHVQHEGLPKPLTLRWE

SEQ ID NO: 349 - protein, 275 aa, Artificial sequence
  synthetic sequence
GSHSMRYFYTSVSRPGRGEPRFIAVGYVDDTQFVRFDSDAASQRMEPRAPWIEQEGPEYWDRNTRKVKAQSQTDRVDLGTLRGCYNQSEDGSHTIQRMYGCDVGPDGRFLRGYQQDAYDGKDYIALNEDLRSWTAADMAAQITQRKWETAHEAEQWRAYLEGTCVEWLRRYLENGKETLQRTDAPKTHMTHHAVSDHEATLRCWALSFYPAEITLTWQRDGEDQTQDTELVETRPCGDGTFQKWASVVVPSGQEQRYTCHVQHEGLPKPLTLRWE

SEQ ID NO: 350 - protein, 276 aa, Artificial sequence
  synthetic sequence
GSHSMRYFYTSVSRPGRGEPRFISVGYVDDTQFVRFDSDAASPREEPRAPWIEQEGPEYWDRNTQIYKAQAQTDRESLRNLRGCYNQSEAGSHTLQSMYGCDVGPDGRLLRGHDQYAYDGKDYIALNEDLRSWTAADTAAQITQRKWEAAREAEQRRAYLEGECVEWLRRYLENGKDKLERADPPKTHVTHHPISDHEATLRCWALGFYPAEITLTWQRDGEDQTQDTELVETRPCGDRTFQKWAAVVVPSGEEQRYTCHVQHEGLPKPLTLRWEP

SEQ ID NO: 351 - protein, 275 aa, Artificial sequence
  synthetic sequence
GSHSMRYFDTAMSRPGRGEPRFISVGYVDDTQFVRFDSDAASPREEPRAPWIEQEGPEYWDRNTQIFKTNTQTDRESLRNLRGCYNQSEAGSHTLQSMYGCDVGPDGRLLRGHNQYAYDGKDYIALNEDLRSWTAADTAAQITQRKWEAARVAEQDRAYLEGTCVEWLRRYLENGKDTLERADPPKTHVTHHPISDHEATLRCWALGFYPAEITLTWQRDGEDQTQDTELVETRPCGDRTFQKWAAVVVPSGEEQRYTCHVQHEGLPKPLTLRWE

SEQ ID NO: 352 - protein, 275 aa, Artificial sequence
  synthetic sequence
GSHSMRYFYTAMSRPGRGEPRFIAVGYVDDTQFVRFDSDAASPRMAPRAPWIEQEGPEYWDRNTQISKTNTQTYRESLRNLRGCYNQSEAGSHIIQRMYGCDVGPDGRLLRGYDQSAYDGKDYIALNEDLSSWTAADTAAQITQRKWEAAREAEQLRAYLEGLCVEWLRRYLENGKETLQRADPPKTHVTHHPISDHEATLRCWALGFYPAEITLTWQRDGEDQTQDTELVETRPCGDRTFQKWAAVVVPSGEEQRYTCHVQHEGLPKPLTLRWE

SEQ ID NO: 353 - protein, 275 aa, Artificial sequence
  synthetic sequence
GSHSMRYFYTSVSRPGRGEPRFISVGYVDDTQFVRFDSDAASPREEPRAPWIEQEGPEYWDRNTQICKTNTQTYRENLRTALRCYNQSEAGSHTLQRMYGCDVGPDGRLLRGHNQFAYDGKDYIALNEDLSSWTAADTAAQITQRKWEAARVAEQLRTYLEGTCVEWLRRYLENGKETLQRADPPKTHVTHHPISDHEATLRCWALGFYPAEITLTWQRDGEDQTQDTELVETRPCGDRTFQKWAAVVVPSGEEQRYTCHVQHEGLPKPLTLRWE

SEQ ID NO: 354 - protein, 275 aa, Artificial sequence
  synthetic sequence
GSHSMRYFHTAMSRPGRGEPRFITVGYVDDTLFVRFDSDATSPRKEPRAPWIEQEGPEYWDRETQISKTNTQTYRESLRNLRGCYNQSEAGSHTLQRMYGCDVGPDGRLLRGHNQYAYDGKDYIALNEDLRSWTAADTAAQISQRKLEAARVAEQLRAYLEGECVEWLRRYLENGKDKLERADPPKTHVTHHPISDHEATLRCWALGFYPAEITLTWQRDGEDQTQDTELVETRPCGDRTFQKWAAVVVPSGEEQRYTCHVQHEGLPKPLTLRWE

SEQ ID NO: 355 - protein, 275 aa, Artificial sequence
  synthetic sequence
GSHSMRYFYTAMSRPGRGEPRFIAVGYVDDTQFVRFDSDAASPRMAPRAPWIEQEGPEYWDRETQKYKRQAQTDRVSLRNLRGCYNQSEAGSHTLQRMYGCDVGPDGRLLRGHDQSAYDGKDYIALNEDLSSWTAADTAAQITQRKWEAAREAEQWRAYLEGLCVEWLRRYLENGKETLQRADPPKTHVTHHPISDHEATLRCWALGFYPAEITLTWQRDGEDQTQDTELVETRPCGDRTFQKWAAVVVPSGEEQRYTCHVQHEGLPKPLTLRWE

SEQ ID NO: 356 - protein, 275 aa, Artificial sequence
  synthetic sequence
GSHSMRYFYTAMSRPGRGEPRFIAVGYVDDTQFVRFDSDAASPRTEPRAPWIEQEGPEYWDRNTQIFKTNTQTYRENLRIALRCYNQSEAGSHIIQRMYGCDLGPDGRLLRGHDQSAYDGKDYIALNEDLSSWTAADTAAQITQRKWEAARVAEQLRAYLEGLCVEWLRRYLENGKETLQRADPPKTHVTHHPVSDHEATLRCWALGFYPAEITLTWQRDGEDQTQDTELVETRPCGDRTFQKWAAVVVPSGEEQRYTCHVQHEGLPKPLTLRWE

SEQ ID NO: 357 - protein, 276 aa, Artificial sequence
  synthetic sequence
CSHSMRYFDTAVSRPGRGEPRFISVGYVDDTQFVRFDSDAASPRGEPRAPWVEQEGPEYWDRETQNYKRQAQADRVSLRNLRGCYNQSEDGSHTLQRMYGCDLGPDGRLLRGYDQSAYDGKDYIALNEDLRSWTAADTAAQITQRKLEAARAAEQLRAYLEGTCVEWLRRYLENGKETLQRAEPPKTHVTHHPLSDHEATLRCWALGFYPAEITLTWQRDGEDQTQDTELVETRPCGDGTFQKWAAVVVPSGQEQRYTCHMQHEGLQEPLTLSWEP

SEQ ID NO: 358 - protein, 276 aa, Artificial sequence
  synthetic sequence
CSHSMKYFFTSVSRPGRGEPRFISVGYVDDTQFVRFDSDAASPRGEPRAPWVEQEGPEYWDRETQKYKRQAQTDRVSLRNLRGCYNQSEAGSHTLQWMCGCDLGPDGRLLRGYDQYAYDGKDYIALNEDLRSWTAADTAAQITQRKWEAAREAEQRRAYLEGTCVEWLRRYLENGKETLQRAEHPKTHVTHHPVSDHEATLRCWALGFYPAEITLTWQWDGEDQTQDTELVETRPCGDGTFQKWAAVMVPSGEEQRYTCHVQHEGLPEPLTLRWEP

SEQ ID NO: 359 - protein, 276 aa, Artificial sequence
  synthetic sequence
GSHSMRYFYTAVSRPGRGEPHFIAVGYVDDTQFVRFDSDAASPRGEPRAPWVEQEGPEYWDRETQKYKRQAQTDRVSLRNLRGCYNQSEARSHIIQRMYGCDVGPDGRLLRGYDQYAYDGKDYIALNEDLRSWTAADTAAQITQRKWEAAREAEQLRAYLEGLCVEWLRRYLKNGKETLQRAEHPKTHVTHHPVSDHEATLRCWALGFYPAEITLTWQWDGEDQTQDTELVETRPCGDGTFQKWAAVVVPSGEEQRYTCHVQHEGLPEPLTLRWEP

SEQ ID NO: 360 - protein, 276 aa, Artificial sequence
  synthetic sequence
GSHSMRYFYTAVSRPGRGEPHFIAVGYVDDTQFVRFDSDAASPRGEPRAPWVEQEGPEYWDRETQKYKRQAQTDRVSLRNLRGCYNQSEAGSHIIQRMYGCDVGPDGRLLRGYDQYAYDGKDYIALNEDLRSWTAADTAAQITQRKWEAAREAEQLRAYLEGLCVEWLRRYLKNGKETLQRAEHPKTHVTHHPVSDHEATLRCWALGFYPAEITLTWQWDGEDQTQDTELVETRPCGDGTFQKWAAVVVPSGEEQRYTCHVQHEGLPEPLTLRWEP

SEQ ID NO: 361 - protein, 276 aa, Artificial sequence
  synthetic sequence
GSHSMRYFSTSVSWPGRGEPRFIAVGYVDDTQFVRFDSDAASPRGEPREPWVEQEGPEYWDRETQKYKRQAQADRVNLRKLRGCYNQSEDGSHTLQRMFGCDLGPDGRLLRGYNQFAYDGKDYIALNEDLRSWTAADTAAQITQRKWEAAREAEQRRAYLEGTCVEWLRRYLENGKETLQRAEHPKTHVTHHPVSDHEATLRCWALGFYPAEITLTWQWDGEDQTQDTELVETRPCGDGTFQKWAAVVVPSGEEQRYTCHVQHEGLPEPLTLRWKP

SEQ ID NO: 362 - protein, 276 aa, Artificial sequence
  synthetic sequence
CSHSMRYFDTAVSRPGRGEPRFISVGYVDDTQFVRFDSDAASPRGEPRAPWVEQEGPEYWDRETQKYKRQAQADRVNLRKLRGCYNQSEDGSHTLQWMYGCDLGPDGRLLRGYDQSAYDGKDYIALNEDLRSWTAADTAAQITQRKWEAAREAEQWRAYLEGTCVEWLRRYLENGKETLQRAEHPKTHVTHHPVSDHEATLRCWALGFYPAEITLTWQRDGEDQTQDTELVETRPCGDGTFQKWAAVVVPSGEEQRYTCHVQHEGLPEPLTLRWEP

SEQ ID NO: 363 - protein, 276 aa, Artificial sequence
  synthetic sequence
CSHSMRYFYTAVSRPGRGEPRFIAVGYVDDTQFVQFDSDAASPRGEPRAPWVEQEGPEYWDRETQKYKRQAQTDRVSLRNLRGCYNQSEAGSHTLQRMYGCDLGPDGRLLRGYNQFAYDGKDYIALNEDLRSWTAADTAAQITQRKWEAARTAEQLRAYLEGTCVEWLRRYLENGKKTLQRAEHPKTHVTHHPVSDHEATLRCWALGFYPAEITLTWQRDGEDQTQDTELVETRPCGDGTFQKWAAVVVPSGEEQRYTCHVQHEGLPEPLTLRWGP

SEQ ID NO: 364 - protein, 276 aa, Artificial sequence
  synthetic sequence
CSHSMRYFYTAVSRPGRGEPHFIAVGYVDDTQFVRFDSDAASPRGEPRAPWVEQEGPEYWDRETQNYKRQAQTDRVNLRKLRGCYNQSEAGSHIIQRMYGCDLGPDGRLLRGHDQLAYDGKDYIALNEDLRSWTAADTAAQITQRKWEAAREAEQLRAYLEGTCVEWLRRYLENGKETLQRAEHPKTHVTHHPVSDHEATLRCWALGFYPAEITLTWQRDGEDQTQDTELVETRPCGDGTFQKWAAVVVPSGEEQRYTCHVQHEGLPEPLTLRWEP

SEQ ID NO: 365 - protein, 223 aa, Artificial sequence
  synthetic sequence
PPCPSCPAPEFLGGPSVFLFPPKPKDTLMISRTPEVTCVVVDVSQEDPEVQFNWYVDGVEVHNAKTKPREEQFNSTYRVVSVLTVLHQDWLNGKEYKCKVSNKGLPSSIEKTISKAKGQPREPQVYTLPPSQEEMTKNQVSLTCLVKGFYPSDIAVEWESNGQPENNYKTTPPVLDSDGSFFLYSRLTVDKSRWQEGNVFSCSVMHEALHNHYTQKSLSLSPG

SEQ ID NO: 366 - protein, 7 aa, Artificial sequence
  synthetic sequence
  MISC_FEATURE (1)..(2): The amino acids from positions 1 to 2 may be repeated at least once
  MISC_FEATURE (3)..(7): The amino acids at positions 3 to 7 may be repeated at least once
GSGSGGS

SEQ ID NO: 367 - protein, 4 aa, Artificial sequence
  synthetic sequence
  MISC_FEATURE (1)..(4): The amino acids at positions 1 to 4 may be repeated at least once
GGGS

SEQ ID NO: 368 - protein, 4 aa, Artificial sequence
  synthetic sequence
GGSG

SEQ ID NO: 369 - protein, 5 aa, Artificial sequence
  synthetic sequence
GGSGG

SEQ ID NO: 370 - protein, 5 aa, Artificial sequence
  synthetic sequence
GSGSG

SEQ ID NO: 371 - protein, 5 aa, Artificial sequence
  synthetic sequence
GSGGG

SEQ ID NO: 372 - protein, 5 aa, Artificial sequence
  synthetic sequence
GGGSG

SEQ ID NO: 373 - protein, 5 aa, Artificial sequence
  synthetic sequence
GSSSG

SEQ ID NO: 374 - protein, 5 aa, Artificial sequence
  synthetic sequence
GSSSS

SEQ ID NO: 375 - protein, 20 aa, Artificial sequence
  synthetic sequence
GSSSSGSSSSGSSSSGSSSS

SEQ ID NO: 376 - protein, 25 aa, Artificial sequence
  synthetic sequence
GSSSSGSSSSGSSSSGSSSSGSSSS

SEQ ID NO: 377 - protein, 5 aa, Artificial sequence
  synthetic sequence
GGGGS

SEQ ID NO: 378 - protein, 10 aa, Artificial sequence
  synthetic sequence
GGGGSGGGGS

SEQ ID NO: 379 - protein, 15 aa, Artificial sequence
  synthetic sequence
GGGGSGGGGSGGGGS

SEQ ID NO: 380 - protein, 20 aa, Artificial sequence
  synthetic sequence
GGGGSGGGGSGGGGSGGGGS

SEQ ID NO: 381 - protein, 25 aa, Artificial sequence
  synthetic sequence
GGGGSGGGGSGGGGSGGGGSGGGGS

SEQ ID NO: 382 - protein, 30 aa, Artificial sequence
  synthetic sequence
GGGGSGGGGSGGGGSGGGGSGGGGSGGGGS

SEQ ID NO: 383 - protein, 35 aa, Artificial sequence
  synthetic sequence
GGGGSGGGGSGGGGSGGGGSGGGGSGGGGSGGGGS

SEQ ID NO: 384 - protein, 40 aa, Artificial sequence
  synthetic sequence
GGGGSGGGGSGGGGSGGGGSGGGGSGGGGSGGGGSGGGGS

SEQ ID NO: 385 - protein, 45 aa, Artificial sequence
  synthetic sequence
GGGGSGGGGSGGGGSGGGGSGGGGSGGGGSGGGGSGGGGSGGGGS

SEQ ID NO: 386 - protein, 50 aa, Artificial sequence
  synthetic sequence
GGGGSGGGGSGGGGSGGGGSGGGGSGGGGSGGGGSGGGGSGGGGSGGGGS

SEQ ID NO: 387 - protein, 5 aa, Artificial sequence
  synthetic sequence
AAAGG

SEQ ID NO: 388 - protein, 8 aa, Artificial sequence
  synthetic sequence
LEVLFQGP

SEQ ID NO: 389 - protein, 7 aa, Artificial sequence
  synthetic sequence
ENLYTQS

SEQ ID NO: 390 - protein, 5 aa, Artificial sequence
  synthetic sequence
DDDDK

SEQ ID NO: 391 - protein, 4 aa, Artificial sequence
  synthetic sequence
LVPR

SEQ ID NO: 392 - protein, 22 aa, Artificial sequence
  synthetic sequence
GSGATNFSLLKQAGDVEENPGP

SEQ ID NO: 393 - protein, 9 aa, Artificial sequence
  synthetic sequence
  MISC_FEATURE (6)..(10): The amino acids from positions 6 to 10 may be repeated 1, 2, or 3 times.
GCGGGGGGS

SEQ ID NO: 394 - protein, 6 aa, Artificial sequence
  synthetic sequence
CHYSEL

SEQ ID NO: 395 - protein, 9 aa, Artificial sequence
  synthetic sequence
GILGFVFTL

SEQ ID NO: 396 - protein, 9 aa, Artificial sequence
  synthetic sequence
HPVGEADYF

SEQ ID NO: 397 - protein, 276 aa, Artificial sequence
  synthetic sequence
CSHSMRYFDTAVSRPGRGEPRFISVGYVDDTQFVRFDSDAASPRGEPRAPWVEQEGPEYWDRETQNYKRQAQADRVSLRNLRGCYNQSEDGSHTLQRMYGCDLGPDGRLLRGYDQSAYDGKDYIALNEDLRSWTAADTCAQITQRKLEAARAAEQLRAYLEGTCVEWLRRYLENGKETLQRAEPPKTHVTHHPLSDHEATLRCWALGFYPAEITLTWQRDGEDQTQDTELVETRPAGDGTFQKWAAVVVPSGQEQRYTCHMQHEGLQEPLTLSWEP

SEQ ID NO: 398 - protein, 10 aa, Artificial sequence
  synthetic sequence
GCGGSGGGGS

SEQ ID NO: 399 - protein, 502 aa, Homo sapiens
MDFLLLQDPASTCVPEPASQHTLRSGPGCLQQPEQQGVRDPGGIWAKLGAAEASAERLQGRRSRGASGSEPQQMGSDVRDLNALLPAVPSLGGGGGCALPVSGAAQWAPVLDFAPPGASAYGSLGGPAPPPAPPPPPPPPPHSFIKQEPSWGGAEPHEEQCLSAFTVHFSGQFTGTAGACRYGPFGPPPPSQASSGQARMFPNAPYLPSCLESQPAIRNQGYSTVTFDGTPSYGHTPSHHAAQFPNHSFKHEDPMGQQGSLGEQQYSVPPPVYGCHTPTDSCTGSQALLLRTPYSSDNLYQMTSQLECMTWNQMNLGATLKGHSTGYESDNHTTPILCGAQYRIHTHGVFRGIQDVRRVPGVAPTLVRSASETSEKRPFMCAYPGCNKRYFKLSHLQMHSRKHTGEKPYQCDFKDCERRFSRSDQLKRHQRRHTGVKPFQCKTCQRKFSRSDHLKTHTRTHTGEKPFSCRWPSCQKKFARSDELVRHHNMHQRNMTKLQLAL

SEQ ID NO: 400 - protein, 519 aa, Homo sapiens
MDFLLLQDPASTCVPEPASQHTLRSGPGCLQQPEQQGVRDPGGIWAKLGAAEASAERLQGRRSRGASGSEPQQMGSDVRDLNALLPAVPSLGGGGGCALPVSGAAQWAPVLDFAPPGASAYGSLGGPAPPPAPPPPPPPPPHSFIKQEPSWGGAEPHEEQCLSAFTVHFSGQFTGTAGACRYGPFGPPPPSQASSGQARMFPNAPYLPSCLESQPAIRNQGYSTVTFDGTPSYGHTPSHHAAQFPNHSFKHEDPMGQQGSLGEQQYSVPPPVYGCHTPTDSCTGSQALLLRTPYSSDNLYQMTSQLECMTWNQMNLGATLKGVAAGSSSSVKWTEGQSNHSTGYESDNHTTPILCGAQYRIHTHGVFRGIQDVRRVPGVAPTLVRSASETSEKRPFMCAYPGCNKRYFKLSHLQMHSRKHTGEKPYQCDFKDCERRFSRSDQLKRHQRRHTGVKPFQCKTCQRKFSRSDHLKTHTRTHTGEKPFSCRWPSCQKKFARSDELVRHHNMHQRNMTKLQLAL

SEQ ID NO: 401 - protein, 522 aa, Homo sapiens
MDFLLLQDPASTCVPEPASQHTLRSGPGCLQQPEQQGVRDPGGIWAKLGAAEASAERLQGRRSRGASGSEPQQMGSDVRDLNALLPAVPSLGGGGGCALPVSGAAQWAPVLDFAPPGASAYGSLGGPAPPPAPPPPPPPPPHSFIKQEPSWGGAEPHEEQCLSAFTVHFSGQFTGTAGACRYGPFGPPPPSQASSGQARMFPNAPYLPSCLESQPAIRNQGYSTVTFDGTPSYGHTPSHHAAQFPNHSFKHEDPMGQQGSLGEQQYSVPPPVYGCHTPTDSCTGSQALLLRTPYSSDNLYQMTSQLECMTWNQMNLGATLKGVAAGSSSSVKWTEGQSNHSTGYESDNHTTPILCGAQYRIHTHGVFRGIQDVRRVPGVAPTLVRSASETSEKRPFMCAYPGCNKRYFKLSHLQMHSRKHTGEKPYQCDFKDCERRFSRSDQLKRHQRRHTGVKPFQCKTCQRKFSRSDHLKTHTRTHTGKTSEKPFSCRWPSCQKKFARSDELVRHHNMHQRNMTKLQLAL

SEQ ID NO: 402 - protein, 302 aa, Homo sapiens
MEKGYSTVTFDGTPSYGHTPSHHAAQFPNHSFKHEDPMGQQGSLGEQQYSVPPPVYGCHTPTDSCTGSQALLLRTPYSSDNLYQMTSQLECMTWNQMNLGATLKGVAAGSSSSVKWTEGQSNHSTGYESDNHTTPILCGAQYRIHTHGVFRGIQDVRRVPGVAPTLVRSASETSEKRPFMCAYPGCNKRYFKLSHLQMHSRKHTGEKPYQCDFKDCERRFSRSDQLKRHQRRHTGVKPFQCKTCQRKFSRSDHLKTHTRTHTGEKPFSCRWPSCQKKFARSDELVRHHNMHQRNMTKLQLAL

SEQ ID NO: 403 - protein, 288 aa, Homo sapiens
MEKGYSTVTFDGTPSYGHTPSHHAAQFPNHSFKHEDPMGQQGSLGEQQYSVPPPVYGCHTPTDSCTGSQALLLRTPYSSDNLYQMTSQLECMTWNQMNLGATLKGHSTGYESDNHTTPILCGAQYRIHTHGVFRGIQDVRRVPGVAPTLVRSASETSEKRPFMCAYPGCNKRYFKLSHLQMHSRKHTGEKPYQCDFKDCERRFSRSDQLKRHQRRHTGVKPFQCKTCQRKFSRSDHLKTHTRTHTGKTSEKPFSCRWPSCQKKFARSDELVRHHNMHQRNMTKLQLAL

SEQ ID NO: 404 - protein, 276 aa, Artificial sequence
  synthetic sequence
CSHSMRYFDTAVSRPGRGEPRFISVGYVDDTQFVRFDSDAASPRGEPRAPWVEQEGPEYWDRETQKYKRQAQADRVSLRNLRGCYNQSEDGSHTLQRMSGCDLGPDGRLLRGYDQSAYDGKDYIALNEDLRSWTAADTAAQITQRKLEAARAAEQLRAYLEGTCVEWLRRYLENGKETLQRAEPPKTHVTHHPLSDHEATLRCWALGFYPAEITLTWQRDGEDQTQDTELVETRPCGDGTFQKWAAVVVPSGQEQRYTCHMQHEGLQEPLTLSWEP

SEQ ID NO: 405 - protein, 817 aa, Artificial sequence
  synthetic sequence
GSHSMRYFSTSVSRPGRGEPRFIAVGYVDDTQFVRFDSDAASQRMEPRAPWIEQEGPEYWDEETGKVKAHSQTDRENLRIALRAYNQSEAGSHTLQMMFGCDVGSDGRFLRGYHQYAYDGKDYIALKEDLRSWTAADMAAQITKRKWEAAHVAEQQRAYLEGTCVDGLRRYLENGKETLQRTDPPKTHMTHHPISDHEATLRCWALGFYPAEITLTWQRDGEDQTQDTELVETRPCGDGTFQKWAAVVVPSGEEQRYTCHVQHEGLPKPLTLRWEGGGGSGGGGSGGGGSAPTSSSTKKTQLQLEALLLDLQMILNGINNYKNPKLTRMLTAKFYMPKKATELKHLQCLEEELKPLEEVLNLAQSKNFHLRPRDLISNINVIVLELKGSETTFMCEYADETATIVEFLNRWITFCQSIISTLTGGGGSGGGGSGGGGSGGGGSAPTSSSTKKTQLQLEALLLDLQMILNGINNYKNPKLTRMLTAKFYMPKKATELKHLQCLEEELKPLEEVLNLAQSKNFHLRPRDLISNINVIVLELKGSETTFMCEYADETATIVEFLNRWITFCQSIISTLTGGGGSGGGGSGGGGSDKTHTCPPCPAPEAAGGPSVFLFPPKPKDTLMISRTPEVTCVVVDVSHEDPEVKFNWYVDGVEVHNAKTKPREEQYNSTYRVVSVLTVLHQDWLNGKEYKCKVSNKALPAPIEKTISKAKGQPREPQVYTLPPSREEMTKNQVSLTCLVKGFYPSDIAVEWESNGQPENNYKTTPPVLDSDGSFFLYSKLTVDKSRWQQGNVFSCSVMHEALHNHYTQKSLSLSPG

SEQ ID NO: 406 - protein, 813 aa, Artificial sequence
  synthetic sequence
APTSSSTKKTQLQLEALLLDLQMILNGINNYKNPKLTRMLTAKFYMPKKATELKHLQCLEEELKPLEEVLNLAQSKNFHLRPRDLISNINVIVLELKGSETTFMCEYADETATIVEFLNRWITFCQSIISTLTGGGGSGGGGSGGGGSGGGGSAPTSSSTKKTQLQLEALLLDLQMILNGINNYKNPKLTRMLTAKFYMPKKATELKHLQCLEEELKPLEEVLNLAQSKNFHLRPRDLISNINVIVLELKGSETTFMCEYADETATIVEFLNRWITFCQSIISTLTGGGGSGGGGSGGGGSGGGGSGSHSMRYFSTSVSRPGRGEPRFIAVGYVDDTQFVRFDSDAASQRMEPRAPWIEQEGPEYWDEETGKVKAHSQTDRENLRIALRAYNQSEAGSHTLQMMFGCDVGSDGRFLRGYHQYAYDGKDYIALKEDLRSWTAADMAAQITKRKWEAAHVAEQQRAYLEGTCVDGLRRYLENGKETLQRTDPPKTHMTHHPISDHEATLRCWALGFYPAEITLTWQRDGEDQTQDTELVETRPCGDGTFQKWAAVVVPSGEEQRYTCHVQHEGLPKPLTLRWEAAAGGDKTHTCPPCPAPEAAGGPSVFLFPPKPKDTLMISRTPEVTCVVVDVSHEDPEVKFNWYVDGVEVHNAKTKPREEQYNSTYRVVSVLTVLHQDWLNGKEYKCKVSNKALPAPIEKTISKAKGQPREPQVYTLPPSREEMTKNQVSLTCLVKGFYPSDIAVEWESNGQPENNYKTTPPVLDSDGSFFLYSKLTVDKSRWQQGNVFSCSVMHEALHNHYTQKSLSLSPGK

SEQ ID NO: 407 - protein, 807 aa, Artificial sequence
  synthetic sequence
GSHSMRYFSTSVSRPGRGEPRFIAVGYVDDTQFVRFDSDAASQRMEPRAPWIEQEGPEYWDEETGKVKAHSQTDRENLRIALRAYNQSEAGSHTLQMMFGCDVGSDGRFLRGYHQYAYDGKDYIALKEDLRSWTAADMAAQITKRKWEAAHVAEQQRAYLEGTCVDGLRRYLENGKETLQRTDPPKTHMTHHPISDHEATLRCWALGFYPAEITLTWQRDGEDQTQDTELVETRPCGDGTFQKWAAVVVPSGEEQRYTCHVQHEGLPKPLTLRWEAAAGGDKTHTCPPCPAPEAAGGPSVFLFPPKPKDTLMISRTPEVTCVVVDVSHEDPEVKFNWYVDGVEVHNAKTKPREEQYNSTYRVVSVLTVLHQDWLNGKEYKCKVSNKALPAPIEKTISKAKGQPREPQVYTLPPSREEMTKNQVSLTCLVKGFYPSDIAVEWESNGQPENNYKTTPPVLDSDGSFFLYSKLTVDKSRWQQGNVFSCSVMHEALHNHYTQKSLSLSPGGGGGSGGGGSGGGGSAPTSSSTKKTQLQLEALLLDLQMILNGINNYKNPKLTRMLTAKFYMPKKATELKHLQCLEEELKPLEEVLNLAQSKNFHLRPRDLISNINVIVLELKGSETTFMCEYADETATIVEFLNRWITFCQSIISTLTGGGGSGGGGSGGGGSGGGGSAPTSSSTKKTQLQLEALLLDLQMILNGINNYKNPKLTRMLTAKFYMPKKATELKHLQCLEEELKPLEEVLNLAQSKNFHLRPRDLISNINVIVLELKGSETTFMCEYADETATIVEFLNRWITFCQSIISTLT

SEQ ID NO: 408 - protein, 123 aa, Artificial sequence
  synthetic sequence
CMTWNQMNLGGGGSGGGGSGGGGSIQRTPKIQVYSCHPAENGKSNFLNCYVSGFHPSDIEVDLLKNGERIEKVEHSDLSFSKDWSFYLLYYTEFTPTEKDEYACRVNHVTLSQPKIVKWDRDM

SEQ ID NO: 409 - protein, 123 aa, Artificial sequence
  synthetic sequence
CYTWNQMNLGGGGSGGGGSGGGGSIQRTPKIQVYSCHPAENGKSNFLNCYVSGFHPSDIEVDLLKNGERIEKVEHSDLSFSKDWSFYLLYYTEFTPTEKDEYACRVNHVTLSQPKIVKWDRDM

SEQ ID NO: 410 - protein, 227 aa, Homo sapiens
DKTHTCPPCPAPELLGGPSVFLFPPKPKDTLMISRTPEVTCVVVDVSHEDPEVKFNWYVDGVEVHNAKTKPREEQYNSTYRVVSVLTVLHQDWLNGKEYKCKVSNKALPAPIEKTISKAKGQPREPQVYTLPPSRDELTKNQVSLTCLVKGFYPSDIAVEWESNGQPENNYKTTPPVLDSDGSFFLYSKLTVDKSRWQQGNVFSCSVMHEALHNHYTQKSLSLSPGK

SEQ ID NO: 411 - protein, 325 aa, Homo sapiens
STKGPSVFPLAPCSRSTSESTAALGCLVKDYFPEPVTVSWNSGALTSGVHTFPAVLQSSGLYSLSSVVTVPSSNFGTQTYTCNVDHKPSNTKVDKTVERKCCVECPPCPAPPVAGPSVFLFPPKPKDTLMISRTPEVTCVVVDVSHEDPEVQFNWYVDGVEVHNAKTKPREEQFNSTFRVVSVLTVVHQDWLNGKEYKCKVSNKGLPAPIEKTISKTKGQPREPQVYTLPPSREEMTKNQVSLTCLVKGFYPSDIAVEWESNGQPENNYKTTPPMLDSDGSFFLYSKLTVDKSRWQQGNVFSCSVMHEALHNHYTQKSLSLSPGK

SEQ ID NO: 412 - protein, 246 aa, Homo sapiens
HKPSNTKVDKRVELKTPLGDTTHTCPPCPAPELLGGPSVFLFPPKPKDTLMISRTPEVTCVVVDVSHEDPEVKFNWYVDGVEVHNAKTKPREEQYNSTYRVVSVLTVLHQDWLNGKEYKCKVSNKALPAPIEKTISKAKGQPREPQVYTLPPSRDELTKNQVSLTCLVKGFYPSDIAVEWESNGQPENNYKTTPPVLDSDGSFFLYSKLTVDKSRWQQGNVFSCSVMHEALHNHYTQKSLSLSPGK

SEQ ID NO: 413 - protein, 383 aa, Homo sapiens
PTKAPDVFPIISGCRHPKDNSPVVLACLITGYHPTSVTVTWYMGTQSQPQRTFPEIQRRDSYYMTSSQLSTPLQQWRQGEYKCVVQHTASKSKKEIFRWPESPKAQASSVPTAQPQAEGSLAKATTAPATTRNTGRGGEEKKKEKEKEEQEERETKTPECPSHTQPLGVYLLTPAVQDLWLRDKATFTCFVVGSDLKDAHLTWEVAGKVPTGGVEEGLLERHSNGSQSQHSRLTLPRSLWNAGTSVTCTLNHPSLPPQRLMALREPAAQAPVKLSLNLLASSDPPEAASWLLCEVSGFSPPNILLMWLEDQREVNTSGFAPARPPPQPRSTTFWAWSVLRVPAPPSPQPATYTCVVSHEDSRTLLNASRSLEVSYVTDHGPMK

SEQ ID NO: 414 - protein, 276 aa, Homo sapiens
VTSTLTIKZSDWLGESMFTCRVDHRGLTFQQNASSMCVPDQDTAIRVFAIPPSFASIFLTKSTKLTCLVTDLTTYBSVTISWTREENGAVKTHTNISESHPNATFSAVGEASICEDBDWSGERFTCTVTHTDLPSPLKQTISRPKGVALHRPBVYLLPPARZZLNLRESATITCLVTGFSPADVFVEWMQRGEPLSPQKYVTSAPMPEPQAPGRYFAHSILTVSEEEWNTGGTYTCVVAHEALPNRVTERTVDKSTGKPTLYNVSLVMSDTAGTCY

SEQ ID NO: 415 - protein, 353 aa, Homo sapiens
ASPTSPKVFPLSLCSTQPDGNVVIACLVQGFFPQEPLSVTWSESGQGVTARNFPPSQDASGDLYTTSSQLTLPATQCLAGKSVTCHVKHYTNPSQDVTVPCPVPSTPPTPSPSTPPTPSPSCCHPRLSLHRPALEDLLLGSEANLTCTLTGLRDASGVTFTWTPSSGKSAVQGPPERDLCGCYSVSSVLPGCAEPWNHGKTFTCTAAYPESKTPLTATLSKSGNTFRPEVHLLPPPSEELALNELVTLTCLARGFSPKDVLVRWLQGSQELPREKYLTWASRQEPSQGTTTFAVTSILRVAAEDWKKGDTFSCMVGHEALPLAFTQKTIDRLAGKPTHVNVSVVMAEVDGTCY

SEQ ID NO: 416 - protein, 222 aa, Homo sapiens
ADPCDSNPRGVSAYLSRPSPFDLFIRKSPTITCLVVDLAPSKGTVNLTWSRASGKPVNHSTRKEEKQRNGTLTVTSTLPVGTRDWIEGETYQCRVTHPHLPRALMRSTTKTSGPRAAPEVYAFATPEWPGSRDKRTLACLIQNFMPEDISVQWLHNEVQLPDARHSTTQPRKTKGSGFFVFSRLEVTRAEWEQKDEFICRAVHEAASPSQTVQRAVSVNPGK

SEQ ID NO: 417 - protein, 327 aa, Homo sapiens
ASTKGPSVFPLAPCSRSTSESTAALGCLVKDYFPEPVTVSWNSGALTSGVHTFPAVLQSSGLYSLSSVVTVPSSSLGTKTYTCNVDHKPSNTKVDKRVESKYGPPCPSCPAPEFLGGPSVFLFPPKPKDTLMISRTPEVTCVVVDVSQEDPEVQFNWYVDGVEVHNAKTKPREEQFNSTYRVVSVLTVLHQDWLNGKEYKCKVSNKGLPSSIEKTISKAKGQPREPQVYTLPPSQEEMTKNQVSLTCLVKGFYPSDIAVEWESNGQPENNYKTTPPVLDSDGSFFLYSRLTVDKSRWQEGNVFSCSVMHEALHNHYTQKSLSLSLGK

SEQ ID NO: 418 - protein, 227 aa, Homo sapiens
DKTHTCPPCPAPELLGGPSVFLFPPKPKDTLMISRTPEVTCVVVDVSHEDPEVKFNWYVDGVEVHNAKTKPREEQYNSTYRVVSVLTVLHQDWLNGKEYKCKVSNKALPAPIEKTISKAKGQPREPQVYTLPPSREEMTKNQVSLTCLVKGFYPSDIAVEWESNGQPENNYKTTPPVLDSDGSFFLYSKLTVDKSRWQQGNVFSCSVMHEALHNHYTQKSLSLSPGK

SEQ ID NO: 419 - protein, 227 aa, Artificial sequence
  synthetic sequence
DKTHTCPPCPAPEFEGGPSVFLFPPKPKDTLMISRTPEVTCVVVDVSHEDPEVKFNWYVDGVEVHNAKTKPREEQYNSTYRVVSVLTVLHQDWLNGKEYKCKVSNKALPASIEKTISKAKGQPREPQVYTLPPSREEMTKNQVSLTCLVKGFYPSDIAVEWESNGQPENNYKTTPPVLDSDGSFFLYSKLTVDKSRWQQGNVFSCSVMHEALHNHYTQKSLSLSPGK

SEQ ID NO: 420 - protein, 227 aa, Artificial sequence
  synthetic sequence
DKTHTCPPCPAPELLGGPSVFLFPPKPKDTLMISRTPEVTCVVVDVSHEDPEVKFNWYVDGVEVHNAKTKPREEQYASTYRVVSVLTVLHQDWLNGKEYKCKVSNKALPAPIEKTISKAKGQPREPQVYTLPPSREEMTKNQVSLTCLVKGFYPSDIAVEWESNGQPENNYKTTPPVLDSDGSFFLYSKLTVDKSRWQQGNVFSCSVMHEALHNHYTQKSLSLSPGK

SEQ ID NO: 421 - protein, 227 aa, Artificial sequence
  synthetic sequence
DKTHTCPPCPAPEAAGGPSVFLFPPKPKDTLMISRTPEVTCVVVDVSHEDPEVKFNWYVDGVEVHNAKTKPREEQYNSTYRVVSVLTVLHQDWLNGKEYKCKVSNKALPAPIEKTISKAKGQPREPQVYTLPPSREEMTKNQVSLTCLVKGFYPSDIAVEWESNGQPENNYKTTPPVLDSDGSFFLYSKLTVDKSRWQQGNVFSCSVMHEALHNHYTQKSLSLSPGK

SEQ ID NO: 422 - protein, 813 aa, Artificial sequence
  synthetic sequence
APTSSSTKKTQLQLEALLLDLQMILNGINNYKNPKLTRMLTAKFYMPKKATELKHLQCLEEELKPLEEVLNLAQSKNFHLRPRDLISNINVIVLELKGSETTFMCEYADETATIVEFLNRWITFCQSIISTLTGGGGSGGGGSGGGGSGGGGSAPTSSSTKKTQLQLEALLLDLQMILNGINNYKNPKLTRMLTAKFYMPKKATELKHLQCLEEELKPLEEVLNLAQSKNFHLRPRDLISNINVIVLELKGSETTFMCEYADETATIVEFLNRWITFCQSIISTLTGGGGSGGGGSGGGGSGGGGSGSHSMRYFFTSVSRPGRGEPRFIAVGYVDDTQFVRFDSDAASQRMEPRAPWIEQEGPEYWDGETRKVKAHSQTHRVDLGTLRGCYNQSEAGSHTVQRMYGCDVGSDWRFLRGYHQYAYDGKDYIALKEDLRSWTAADMAAQTTKHKWEAAHVAEQLRAYLEGTCVEWLRRYLENGKETLQRTDAPKTHMTHHAVSDHEATLRCWALSFYPAEITLTWQRDGEDQTQDTELVETRPCGDGTFQKWAAVVVPSGQEQRYTCHVQHEGLPKPLTLRWEAAAGGDKTHTCPPCPAPEAAGGPSVFLFPPKPKDTLMISRTPEVTCVVVDVSHEDPEVKFNWYVDGVEVHNAKTKPREEQYNSTYRVVSVLTVLHQDWLNGKEYKCKVSNKALPAPIEKTISKAKGQPREPQVYTLPPSREEMTKNQVSLTCLVKGFYPSDIAVEWESNGQPENNYKTTPPVLDSDGSFFLYSKLTVDKSRWQQGNVFSCSVMHEALHNHYTQKSLSLSPGK

SEQ ID NO: 423 - protein, 123 aa, Artificial sequence
  synthetic sequence
VLDFAPPGAGCGGSGGGGSGGGGSIQRTPKIQVYSCHPAENGKSNFLNCYVSGFHPSDIEVDLLKNGERIEKVEHSDLSFSKDWSFYLLYYTEFTPTEKDEYACRVNHVTLSQPKIVKWDRDM

SEQ ID NO: 424 - protein, 123 aa, Artificial sequence
  synthetic sequence
RMFPNAPYLGCGGSGGGGSGGGGSIQRTPKIQVYSCHPAENGKSNFLNCYVSGFHPSDIEVDLLKNGERIEKVEHSDLSFSKDWSFYLLYYTEFTPTEKDEYACRVNHVTLSQPKIVKWDRDM

SEQ ID NO: 425 - protein, 812 aa, Artificial sequence
  synthetic sequence
APTSSSTKKTQLQLEALLLDLQMILNGINNYKNPKLTRMLTAKFYMPKKATELKHLQCLEEELKPLEEVLNLAQSKNFHLRPRDLISNINVIVLELKGSETTFMCEYADETATIVEFLNRWITFCQSIISTLTGGGGSGGGGSGGGGSGGGGSAPTSSSTKKTQLQLEALLLDLQMILNGINNYKNPKLTRMLTAKFYMPKKATELKHLQCLEEELKPLEEVLNLAQSKNFHLRPRDLISNINVIVLELKGSETTFMCEYADETATIVEFLNRWITFCQSIISTLTGGGGSGGGGSGGGGSGGGGSGSHSMRYFFTSVSRPGRGEPRFIAVGYVDDTQFVRFDSDAASQRMEPRAPWIEQEGPEYWDGETRKVKAHSQTHRVDLGTLRGCYNQSEAGSHTVQRMYGCDVGSDWRFLRGYHQYAYDGKDYIALKEDLRSWTAADMAAQTTKHKWEAAHVAEQLRAYLEGTCVEWLRRYLENGKETLQRTDAPKTHMTHHAVSDHEATLRCWALSFYPAEITLTWQRDGEDQTQDTELVETRPAGDGTFQKWAAVVVPSGQEQRYTCHVQHEGLPKPLTLRWEAAAGGDKTHTCPPCPAPEAAGGPSVFLFPPKPKDTLMISRTPEVTCVVVDVSHEDPEVKFNWYVDGVEVHNAKTKPREEQYNSTYRVVSVLTVLHQDWLNGKEYKCKVSNKALPAPIEKTISKAKGQPREPQVYTLPPSREEMTKNQVSLTCLVKGFYPSDIAVEWESNGQPENNYKTTPPVLDSDGSFFLYSKLTVDKSRWQQGNVFSCSVMHEALHNHYTQKSLSLSPG

SEQ ID NO: 426 - protein, 813 aa, Artificial sequence
  synthetic sequence
APTSSSTKKTQLQLEALLLDLQMILNGINNYKNPKLTRMLTAKFYMPKKATELKHLQCLEEELKPLEEVLNLAQSKNFHLRPRDLISNINVIVLELKGSETTFMCEYADETATIVEFLNRWITFCQSIISTLTGGGGSGGGGSGGGGSGGGGSAPTSSSTKKTQLQLEALLLDLQMILNGINNYKNPKLTRMLTAKFYMPKKATELKHLQCLEEELKPLEEVLNLAQSKNFHLRPRDLISNINVIVLELKGSETTFMCEYADETATIVEFLNRWITFCQSIISTLTGGGGSGGGGSGGGGSGGGGSGSHSMRYFFTSVSRPGRGEPRFIAVGYVDDTQFVRFDSDAASQRMEPRAPWIEQEGPEYWDGETRKVKAHSQTHRVDLGTLRGAYNQSEAGSHTVQRMYGCDVGSDWRFLRGYHQYAYDGKDYIALKEDLRSWTAADMAAQTTKHKWEAAHVAEQLRAYLEGTCVEWLRRYLENGKETLQRTDAPKTHMTHHAVSDHEATLRCWALSFYPAEITLTWQRDGEDQTQDTELVETRPCGDGTFQKWAAVVVPSGQEQRYTCHVQHEGLPKPLTLRWEAAAGGDKTHTCPPCPAPEAAGGPSVFLFPPKPKDTLMISRTPEVTCVVVDVSHEDPEVKFNWYVDGVEVHNAKTKPREEQYNSTYRVVSVLTVLHQDWLNGKEYKCKVSNKALPAPIEKTISKAKGQPREPQVYTLPPSREEMTKNQVSLTCLVKGFYPSDIAVEWESNGQPENNYKTTPPVLDSDGSFFLYSKLTVDKSRWQQGNVFSCSVMHEALHNHYTQKSLSLSPGK

SEQ ID NO: 427 - protein, 123 aa, Artificial sequence
  synthetic sequence
VLDFAPPGAGCGGSGGGGSGGGGSIQRTPKIQVYSRHPAENGKSNFLNCYVSGFHPSDIEVDLLKNGERIEKVEHSDLSFSKDWSFYLLYYTEFTPTEKDEYACRVNHVTLSQPKIVKWDRDM

SEQ ID NO: 428 - protein, 123 aa, Artificial sequence
  synthetic sequence
RMFPNAPYLGCGGSGGGGSGGGGSIQRTPKIQVYSRHPAENGKSNFLNCYVSGFHPSDIEVDLLKNGERIEKVEHSDLSFSKDWSFYLLYYTEFTPTEKDEYACRVNHVTLSQPKIVKWDRDM

SEQ ID NO: 429 - protein, 123 aa, Artificial sequence
  synthetic sequence
YMFPNAPYLGCGGSGGGGSGGGGSIQRTPKIQVYSCHPAENGKSNFLNCYVSGFHPSDIEVDLLKNGERIEKVEHSDLSFSKDWSFYLLYYTEFTPTEKDEYACRVNHVTLSQPKIVKWDRDM

SEQ ID NO: 430 - protein, 123 aa, Artificial sequence
  synthetic sequence
YMFPNAPYLGCGGSGGGGSGGGGSIQRTPKIQVYSRHPAENGKSNFLNCYVSGFHPSDIEVDLLKNGERIEKVEHSDLSFSKDWSFYLLYYTEFTPTEKDEYACRVNHVTLSQPKIVKWDRDM

SEQ ID NO: 431 - protein, 812 aa, Artificial sequence
  synthetic sequence
APTSSSTKKTQLQLEALLLDLQMILNGINNYKNPKLTRMLTAKFYMPKKATELKHLQCLEEELKPLEEVLNLAQSKNFHLRPRDLISNINVIVLELKGSETTFMCEYADETATIVEFLNRWITFCQSIISTLTGGGGSGGGGSGGGGSGGGGSAPTSSSTKKTQLQLEALLLDLQMILNGINNYKNPKLTRMLTAKFYMPKKATELKHLQCLEEELKPLEEVLNLAQSKNFHLRPRDLISNINVIVLELKGSETTFMCEYADETATIVEFLNRWITFCQSIISTLTGGGGSGGGGSGGGGSGGGGSGSHSMRYFSTSVSRPGRGEPRFIAVGYVDDTQFVRFDSDAASQRMEPRAPWIEQEGPEYWDEETGKVKAHSQTDRENLRIALRCYNQSEAGSHTLQMMFGCDVGSDGRFLRGYHQYAYDGKDYIALKEDLRSWTAADMAAQITKRKWEAAHVAEQQRAYLEGTCVDGLRRYLENGKETLQRTDPPKTHMTHHPISDHEATLRCWALGFYPAEITLTWQRDGEDQTQDTELVETRPCGDGTFQKWAAVVVPSGEEQRYTCHVQHEGLPKPLTLRWEAAAGGDKTHTCPPCPAPEAAGGPSVFLFPPKPKDTLMISRTPEVTCVVVDVSHEDPEVKFNWYVDGVEVHNAKTKPREEQYNSTYRVVSVLTVLHQDWLNGKEYKCKVSNKALPAPIEKTISKAKGQPREPQVYTLPPSREEMTKNQVSLTCLVKGFYPSDIAVEWESNGQPENNYKTTPPVLDSDGSFFLYSKLTVDKSRWQQGNVFSCSVMHEALHNHYTQKSLSLSPG

SEQ ID NO: 432 - protein, 807 aa, Artificial sequence
  synthetic sequence
GSHSMRYFSTSVSRPGRGEPRFIAVGYVDDTQFVRFDSDAASQRMEPRAPWIEQEGPEYWDEETGKVKAHSQTDRENLRIALRCYNQSEAGSHTLQMMFGCDVGSDGRFLRGYHQYAYDGKDYIALKEDLRSWTAADMAAQITKRKWEAAHVAEQQRAYLEGTCVDGLRRYLENGKETLQRTDPPKTHMTHHPISDHEATLRCWALGFYPAEITLTWQRDGEDQTQDTELVETRPCGDGTFQKWAAVVVPSGEEQRYTCHVQHEGLPKPLTLRWEAAAGGDKTHTCPPCPAPEAAGGPSVFLFPPKPKDTLMISRTPEVTCVVVDVSHEDPEVKFNWYVDGVEVHNAKTKPREEQYNSTYRVVSVLTVLHQDWLNGKEYKCKVSNKALPAPIEKTISKAKGQPREPQVYTLPPSREEMTKNQVSLTCLVKGFYPSDIAVEWESNGQPENNYKTTPPVLDSDGSFFLYSKLTVDKSRWQQGNVFSCSVMHEALHNHYTQKSLSLSPGGGGGSGGGGSGGGGSAPTSSSTKKTQLQLEALLLDLQMILNGINNYKNPKLTRMLTAKFYMPKKATELKHLQCLEEELKPLEEVLNLAQSKNFHLRPRDLISNINVIVLELKGSETTFMCEYADETATIVEFLNRWITFCQSIISTLTGGGGSGGGGSGGGGSGGGGSAPTSSSTKKTQLQLEALLLDLQMILNGINNYKNPKLTRMLTAKFYMPKKATELKHLQCLEEELKPLEEVLNLAQSKNFHLRPRDLISNINVIVLELKGSETTFMCEYADETATIVEFLNRWITFCQSIISTLT

SEQ ID NO: 433 - protein, 506 aa, Artificial sequence
  synthetic sequence
GSHSMRYFSTSVSRPGRGEPRFIAVGYVDDTQFVRFDSDAASQRMEPRAPWIEQEGPEYWDEETGKVKAHSQTDRENLRIALRCYNQSEAGSHTLQMMFGCDVGSDGRFLRGYHQYAYDGKDYIALKEDLRSWTAADMAAQITKRKWEAAHVAEQQRAYLEGTCVDGLRRYLENGKETLQRTDPPKTHMTHHPISDHEATLRCWALGFYPAEITLTWQRDGEDQTQDTELVETRPCGDGTFQKWAAVVVPSGEEQRYTCHVQHEGLPKPLTLRWEAAAGGDKTHTCPPCPAPEAAGGPSVFLFPPKPKDTLMISRTPEVTCVVVDVSHEDPEVKFNWYVDGVEVHNAKTKPREEQYNSTYRVVSVLTVLHQDWLNGKEYKCKVSNKALPAPIEKTISKAKGQPREPQVYTLPPSREEMTKNQVSLTCLVKGFYPSDIAVEWESNGQPENNYKTTPPVLDSDGSFFLYSKLTVDKSRWQQGNVFSCSVMHEALHNHYTQKSLSLSPG

SEQ ID NO: 434 - protein, 507 aa, Artificial sequence
  synthetic sequence
GSHSMRYFSTSVSRPGRGEPRFIAVGYVDDTQFVRFDSDAASQRMEPRAPWIEQEGPEYWDEETGKVKAHSQTDRENLRIALRAYNQSEAGSHTLQMMFGCDVGSDGRFLRGYHQYAYDGKDYIALKEDLRSWTAADMAAQITKRKWEAAHVAEQQRAYLEGTCVDGLRRYLENGKETLQRTDPPKTHMTHHPISDHEATLRCWALGFYPAEITLTWQRDGEDQTQDTELVETRPCGDGTFQKWAAVVVPSGEEQRYTCHVQHEGLPKPLTLRWEAAAGGDKTHTCPPCPAPEAAGGPSVFLFPPKPKDTLMISRTPEVTCVVVDVSHEDPEVKFNWYVDGVEVHNAKTKPREEQYNSTYRVVSVLTVLHQDWLNGKEYKCKVSNKALPAPIEKTISKAKGQPREPQVYTLPPSREEMTKNQVSLTCLVKGFYPSDIAVEWESNGQPENNYKTTPPVLDSDGSFFLYSKLTVDKSRWQQGNVFSCSVMHEALHNHYTQKSLSLSPGK

SEQ ID NO: 435 - protein, 812 aa, Artificial sequence
  synthetic sequence
APTSSSTKKTQLQLEALLLDLQMILNGINNYKNPKLTRMLTAKFYMPKKATELKHLQCLEEELKPLEEVLNLAQSKNFHLRPRDLISNINVIVLELKGSETTFMCEYADETATIVEFLNRWITFCQSIISTLTGGGGSGGGGSGGGGSGGGGSAPTSSSTKKTQLQLEALLLDLQMILNGINNYKNPKLTRMLTAKFYMPKKATELKHLQCLEEELKPLEEVLNLAQSKNFHLRPRDLISNINVIVLELKGSETTFMCEYADETATIVEFLNRWITFCQSIISTLTGGGGSGGGGSGGGGSGGGGSGSHSMRYFSTSVSRPGRGEPRFIAVGYVDDTQFVRFDSDAASQRMEPRAPWIEQEGPEYWDEETGKVKAHSQTDRENLRIALRCYNQSEAGSHTLQMMFGCDVGSDGRFLRGYHQYAYDGKDYIALKEDLRSWTAADMAAQITKRKWEAAHVAEQQRAYLEGTCVDGLRRYLENGKETLQRTDPPKTHMTHHPISDHEATLRCWALGFYPAEITLTWQRDGEDQTQDTELVETRPAGDGTFQKWAAVVVPSGEEQRYTCHVQHEGLPKPLTLRWEAAAGGDKTHTCPPCPAPEAAGGPSVFLFPPKPKDTLMISRTPEVTCVVVDVSHEDPEVKFNWYVDGVEVHNAKTKPREEQYNSTYRVVSVLTVLHQDWLNGKEYKCKVSNKALPAPIEKTISKAKGQPREPQVYTLPPSREEMTKNQVSLTCLVKGFYPSDIAVEWESNGQPENNYKTTPPVLDSDGSFFLYSKLTVDKSRWQQGNVFSCSVMHEALHNHYTQKSLSLSPG

SEQ ID NO: 436 - protein, 807 aa, Artificial sequence
  synthetic sequence
GSHSMRYFSTSVSRPGRGEPRFIAVGYVDDTQFVRFDSDAASQRMEPRAPWIEQEGPEYWDEETGKVKAHSQTDRENLRIALRCYNQSEAGSHTLQMMFGCDVGSDGRFLRGYHQYAYDGKDYIALKEDLRSWTAADMAAQITKRKWEAAHVAEQQRAYLEGTCVDGLRRYLENGKETLQRTDPPKTHMTHHPISDHEATLRCWALGFYPAEITLTWQRDGEDQTQDTELVETRPAGDGTFQKWAAVVVPSGEEQRYTCHVQHEGLPKPLTLRWEAAAGGDKTHTCPPCPAPEAAGGPSVFLFPPKPKDTLMISRTPEVTCVVVDVSHEDPEVKFNWYVDGVEVHNAKTKPREEQYNSTYRVVSVLTVLHQDWLNGKEYKCKVSNKALPAPIEKTISKAKGQPREPQVYTLPPSREEMTKNQVSLTCLVKGFYPSDIAVEWESNGQPENNYKTTPPVLDSDGSFFLYSKLTVDKSRWQQGNVFSCSVMHEALHNHYTQKSLSLSPGGGGGSGGGGSGGGGSAPTSSSTKKTQLQLEALLLDLQMILNGINNYKNPKLTRMLTAKFYMPKKATELKHLQCLEEELKPLEEVLNLAQSKNFHLRPRDLISNINVIVLELKGSETTFMCEYADETATIVEFLNRWITFCQSIISTLTGGGGSGGGGSGGGGSGGGGSAPTSSSTKKTQLQLEALLLDLQMILNGINNYKNPKLTRMLTAKFYMPKKATELKHLQCLEEELKPLEEVLNLAQSKNFHLRPRDLISNINVIVLELKGSETTFMCEYADETATIVEFLNRWITFCQSIISTLT

SEQ ID NO: 437 - protein, 506 aa, Artificial sequence
  synthetic sequence
GSHSMRYFSTSVSRPGRGEPRFIAVGYVDDTQFVRFDSDAASQRMEPRAPWIEQEGPEYWDEETGKVKAHSQTDRENLRIALRCYNQSEAGSHTLQMMFGCDVGSDGRFLRGYHQYAYDGKDYIALKEDLRSWTAADMAAQITKRKWEAAHVAEQQRAYLEGTCVDGLRRYLENGKETLQRTDPPKTHMTHHPISDHEATLRCWALGFYPAEITLTWQRDGEDQTQDTELVETRPAGDGTFQKWAAVVVPSGEEQRYTCHVQHEGLPKPLTLRWEAAAGGDKTHTCPPCPAPEAAGGPSVFLFPPKPKDTLMISRTPEVTCVVVDVSHEDPEVKFNWYVDGVEVHNAKTKPREEQYNSTYRVVSVLTVLHQDWLNGKEYKCKVSNKALPAPIEKTISKAKGQPREPQVYTLPPSREEMTKNQVSLTCLVKGFYPSDIAVEWESNGQPENNYKTTPPVLDSDGSFFLYSKLTVDKSRWQQGNVFSCSVMHEALHNHYTQKSLSLSPG

SEQ ID NO: 438 - protein, 123 aa, Artificial sequence
  synthetic sequence
CYTWNQMNLGCGGSGGGGSGGGGSIQRTPKIQVYSCHPAENGKSNFLNCYVSGFHPSDIEVDLLKNGERIEKVEHSDLSFSKDWSFYLLYYTEFTPTEKDEYACRVNHVTLSQPKIVKWDRDM

SEQ ID NO: 439 - protein, 424 aa, Artificial sequence
  synthetic sequence
CYTWNQMNLGCGGSGGGGSGGGGSIQRTPKIQVYSCHPAENGKSNFLNCYVSGFHPSDIEVDLLKNGERIEKVEHSDLSFSKDWSFYLLYYTEFTPTEKDEYACRVNHVTLSQPKIVKWDRDMGGGGSGGGGSGGGGSAPTSSSTKKTQLQLEALLLDLQMILNGINNYKNPKLTRMLTAKFYMPKKATELKHLQCLEEELKPLEEVLNLAQSKNFHLRPRDLISNINVIVLELKGSETTFMCEYADETATIVEFLNRWITFCQSIISTLTGGGGSGGGGSGGGGSGGGGSAPTSSSTKKTQLQLEALLLDLQMILNGINNYKNPKLTRMLTAKFYMPKKATELKHLQCLEEELKPLEEVLNLAQSKNFHLRPRDLISNINVIVLELKGSETTFMCEYADETATIVEFLNRWITFCQSIISTLT

SEQ ID NO: 440 - protein, 424 aa, Artificial sequence
  synthetic sequence
CYTWNQMNLGGGGSGGGGSGGGGSIQRTPKIQVYSCHPAENGKSNFLNCYVSGFHPSDIEVDLLKNGERIEKVEHSDLSFSKDWSFYLLYYTEFTPTEKDEYACRVNHVTLSQPKIVKWDRDMGGGGSGGGGSGGGGSAPTSSSTKKTQLQLEALLLDLQMILNGINNYKNPKLTRMLTAKFYMPKKATELKHLQCLEEELKPLEEVLNLAQSKNFHLRPRDLISNINVIVLELKGSETTFMCEYADETATIVEFLNRWITFCQSIISTLTGGGGSGGGGSGGGGSGGGGSAPTSSSTKKTQLQLEALLLDLQMILNGINNYKNPKLTRMLTAKFYMPKKATELKHLQCLEEELKPLEEVLNLAQSKNFHLRPRDLISNINVIVLELKGSETTFMCEYADETATIVEFLNRWITFCQSIISTLT

SEQ ID NO: 441 - protein, 123 aa, Artificial sequence
  synthetic sequence
CYTWNQMNLGCGGSGGGGSGGGGSIQRTPKIQVYSRHPAENGKSNFLNCYVSGFHPSDIEVDLLKNGERIEKVEHSDLSFSKDWSFYLLYYTEFTPTEKDEYACRVNHVTLSQPKIVKWDRDM

SEQ ID NO: 442 - protein, 424 aa, Artificial sequence
  synthetic sequence
CYTWNQMNLGCGGSGGGGSGGGGSIQRTPKIQVYSRHPAENGKSNFLNCYVSGFHPSDIEVDLLKNGERIEKVEHSDLSFSKDWSFYLLYYTEFTPTEKDEYACRVNHVTLSQPKIVKWDRDMGGGGSGGGGSGGGGSAPTSSSTKKTQLQLEALLLDLQMILNGINNYKNPKLTRMLTAKFYMPKKATELKHLQCLEEELKPLEEVLNLAQSKNFHLRPRDLISNINVIVLELKGSETTFMCEYADETATIVEFLNRWITFCQSIISTLTGGGGSGGGGSGGGGSGGGGSAPTSSSTKKTQLQLEALLLDLQMILNGINNYKNPKLTRMLTAKFYMPKKATELKHLQCLEEELKPLEEVLNLAQSKNFHLRPRDLISNINVIVLELKGSETTFMCEYADETATIVEFLNRWITFCQSIISTLT

SEQ ID NO: 443 - protein, 123 aa, Artificial sequence
  synthetic sequence
NYMNLGATLGCGGSGGGGSGGGGSIQRTPKIQVYSCHPAENGKSNFLNCYVSGFHPSDIEVDLLKNGERIEKVEHSDLSFSKDWSFYLLYYTEFTPTEKDEYACRVNHVTLSQPKIVKWDRDM

SEQ ID NO: 444 - protein, 424 aa, Artificial sequence
  synthetic sequence
NYMNLGATLGCGGSGGGGSGGGGSIQRTPKIQVYSCHPAENGKSNFLNCYVSGFHPSDIEVDLLKNGERIEKVEHSDLSFSKDWSFYLLYYTEFTPTEKDEYACRVNHVTLSQPKIVKWDRDMGGGGSGGGGSGGGGSAPTSSSTKKTQLQLEALLLDLQMILNGINNYKNPKLTRMLTAKFYMPKKATELKHLQCLEEELKPLEEVLNLAQSKNFHLRPRDLISNINVIVLELKGSETTFMCEYADETATIVEFLNRWITFCQSIISTLTGGGGSGGGGSGGGGSGGGGSAPTSSSTKKTQLQLEALLLDLQMILNGINNYKNPKLTRMLTAKFYMPKKATELKHLQCLEEELKPLEEVLNLAQSKNFHLRPRDLISNINVIVLELKGSETTFMCEYADETATIVEFLNRWITFCQSIISTLT

SEQ ID NO: 445 - protein, 123 aa, Artificial sequence
  synthetic sequence
NYMNLGATLGGGGSGGGGSGGGGSIQRTPKIQVYSCHPAENGKSNFLNCYVSGFHPSDIEVDLLKNGERIEKVEHSDLSFSKDWSFYLLYYTEFTPTEKDEYACRVNHVTLSQPKIVKWDRDM

SEQ ID NO: 446 - protein, 424 aa, Artificial sequence
  synthetic sequence
NYMNLGATLGGGGSGGGGSGGGGSIQRTPKIQVYSCHPAENGKSNFLNCYVSGFHPSDIEVDLLKNGERIEKVEHSDLSFSKDWSFYLLYYTEFTPTEKDEYACRVNHVTLSQPKIVKWDRDMGGGGSGGGGSGGGGSAPTSSSTKKTQLQLEALLLDLQMILNGINNYKNPKLTRMLTAKFYMPKKATELKHLQCLEEELKPLEEVLNLAQSKNFHLRPRDLISNINVIVLELKGSETTFMCEYADETATIVEFLNRWITFCQSIISTLTGGGGSGGGGSGGGGSGGGGSAPTSSSTKKTQLQLEALLLDLQMILNGINNYKNPKLTRMLTAKFYMPKKATELKHLQCLEEELKPLEEVLNLAQSKNFHLRPRDLISNINVIVLELKGSETTFMCEYADETATIVEFLNRWITFCQSIISTLT

SEQ ID NO: 447 - protein, 123 aa, Artificial sequence
  synthetic sequence
NYMNLGATLGCGGSGGGGSGGGGSIQRTPKIQVYSRHPAENGKSNFLNCYVSGFHPSDIEVDLLKNGERIEKVEHSDLSFSKDWSFYLLYYTEFTPTEKDEYACRVNHVTLSQPKIVKWDRDM

SEQ ID NO: 448 - protein, 424 aa, Artificial sequence
  synthetic sequence
NYMNLGATLGCGGSGGGGSGGGGSIQRTPKIQVYSRHPAENGKSNFLNCYVSGFHPSDIEVDLLKNGERIEKVEHSDLSFSKDWSFYLLYYTEFTPTEKDEYACRVNHVTLSQPKIVKWDRDMGGGGSGGGGSGGGGSAPTSSSTKKTQLQLEALLLDLQMILNGINNYKNPKLTRMLTAKFYMPKKATELKHLQCLEEELKPLEEVLNLAQSKNFHLRPRDLISNINVIVLELKGSETTFMCEYADETATIVEFLNRWITFCQSIISTLTGGGGSGGGGSGGGGSGGGGSAPTSSSTKKTQLQLEALLLDLQMILNGINNYKNPKLTRMLTAKFYMPKKATELKHLQCLEEELKPLEEVLNLAQSKNFHLRPRDLISNINVIVLELKGSETTFMCEYADETATIVEFLNRWITFCQSIISTLT

SEQ ID NO: 449 - protein, 275 aa, Artificial sequence [sequence omitted]

SEQ ID NO: 450 - protein, 275 aa, Artificial sequence; identical to SEQ ID NO: 46
  synthetic sequence

1.-36. (canceled)

37. A T-cell modulatory multimeric polypeptide (TMMP) comprising:
at least one heterodimer comprising:
a) a first polypeptide comprising:
i) a Wilms tumor-1 (WT-1) peptide epitope, wherein the WT-1 peptide has a length of from 8 amino acids to 16 amino acids; and
ii) first class I major histocompatibility complex (MHC) polypeptide;
b) a second polypeptide comprising a second class I MHC polypeptide, and
c) at least one immunomodulatory polypeptide,
wherein the first and/or the second polypeptide comprises the at least one immunomodulatory polypeptide,
wherein the first or the second polypeptide comprises an immunoglobulin (Ig) Fc polypeptide; and
wherein the first class I MHC polypeptide is a β2-microglobulin (β2M) polypeptide and the second class I MHC polypeptide is an MHC class I heavy chain polypeptide, and
wherein the first polypeptide and the second polypeptide are covalently linked to one another via at least a first and second disulfide bond, wherein the first disulfide bond formed between (i) a Cys residue in a Cys-containing linker between the WT-1 peptide epitope and the β2M polypeptide, and (ii) a Cys residue in the MHC class I heavy chain polypeptide; and the second disulfide bond is formed between a Cys residue in the β2M polypeptide and a Cys residue in the MHC class I heavy chain polypeptide.

38. A TMMP of claim 37, wherein:
a) the first polypeptide comprises, in order from N-terminus to C-terminus:
i) the WT-1 peptide epitope;
ii) the Cys-containing linker; and
iii) the β2M polypeptide; and
b) the second polypeptide comprises, in order from N-terminus to C-terminus:
i) the at least one immunomodulatory polypeptide, wherein the at least one immunomodulatory polypeptide is an activating immunomodulatory polypeptide;
ii) an optional linker;
iii) the MHC heavy chain polypeptide;
iv) an optional linker; and
v) the Ig Fc polypeptide,
wherein when the TMMP comprises more than one activating immunomodulatory polypeptide, the TMMP may comprise one or more linkers between the activating immunomodulatory polypeptides.

39. A TMMP of claim 37, wherein:
a) the first polypeptide comprises, in order from N-terminus to C-terminus:
i) the WT-1 peptide epitope;
ii) the Cys-containing linker; and
iii) the first MHC class I polypeptide; and
b) the second polypeptide comprises, in order from N-terminus to C-terminus:
i) the second MHC class I polypeptide;
ii) an optional linker;
iii) the Ig Fc polypeptide;
iv) an optional linker; and
v) the at least one immunomodulatory polypeptide, wherein the at least one immunomodulatory polypeptide is an activating immunomodulatory polypeptide,
wherein when the TMMP comprises more than one activating immunomodulatory polypeptide, the TMMP may comprise one or more linkers between the activating immunomodulatory polypeptides.

40. A TMMP of claim 37, wherein the at least one immunomodulatory polypeptide is selected from the group consisting of a cytokine, a 4-1BBL polypeptide, an ICOS-L polypeptide, an OX-40L polypeptide, a CD80 polypeptide, a CD86 polypeptide, a CD40 polypeptide, a CD70 polypeptide, and combinations thereof.

41. A TMMP of claim 37, wherein the at least one immunomodulatory polypeptide is a wild type or variant IL-2 polypeptide.

42. A TMMP of claim 41, wherein the at least one immunomodulatory polypeptide is a variant IL-2 polypeptide that exhibits reduced affinity to an IL-2 receptor compared to the affinity of a wild-type IL-2 polypeptide for the IL-2 receptor.

43. A TMMP of claim 42, wherein the variant IL-2 polypeptide comprises: i) an H16A substitution and an F42A substitution; or ii) an H16T substitution and an F42A substitution.

44. A TMMP of claim 37, wherein the MHC class I heavy chain polypeptide comprises an amino acid sequence having at least 95% amino acid sequence identity to SEQ ID NO:199, SEQ ID NO:201 or SEQ ID NO:203.

45. A TMMP of claim 38, wherein the TMMP comprises two activating immunomodulatory polypeptides that are in tandem and optionally joined by a linker, and wherein each of the activating immunomodulatory polypeptides is a variant IL-2 polypeptide that comprises an amino acid sequence having at least 95% amino acid sequence identity to the amino acid sequence set forth in SEQ ID NO:188, wherein X1 is Ala and X2 is Ala, or wherein X1 is Thr and X2 is Ala,
wherein the first disulfide bond is formed between (i) a Cys residue in a linker between the WT-1 peptide epitope and the β2M polypeptide, and (ii) a Cys residue at position 84 in the MHC Class I heavy chain polypeptide, and wherein the second disulfide bond is formed between a Cys residue at position 12 of the β2M polypeptide and a Cys residue at position 236 of the MHC class I heavy chain polypeptide,
wherein the MHC class I heavy chain polypeptide comprises an amino acid sequence having at least 95% amino acid sequence identity to the amino acid sequence set forth in SEQ ID NO:451, where amino acid 84 is a Cys and amino acid 236 is a Cys, and
wherein the Ig Fc polypeptide has at least about 95% amino acid sequence identity to the amino acid sequence set forth in any one of SEQ ID NO:418-421.

46. A TMMP of claim 45, wherein the activating immunomodulatory polypeptides are joined by a linker, and each activating immunomodulatory polypeptides has the amino acid sequence set forth in SEQ ID NO:188, wherein X1 is Ala and X2 is Ala.

47. A TMMP comprising a first and a second heterodimer according to claim 46, wherein the first and second heterodimers are identical in amino acid sequence and are covalently bound to each other by one or more disulfide bonds between the Ig Fc polypeptides of the first and second heterodimers.

48. A composition comprising one or more nucleic acids comprising nucleotide sequences encoding the first and second polypeptides of the TMMP of claim 37.

49. A composition comprising one or more expression vectors, wherein the one or more expression vectors comprise nucleotide sequences encoding the first and second polypeptides of the TMMP of claim 37.

50. A method of producing a TMMP of claim 37, the method comprising culturing a host cell that is genetically modified with one or more expression vectors comprising nucleotide sequences encoding the first and the second polypeptides of the multimeric polypeptide, under conditions such that the genetically modified host cell produces the TMMP.

51. An in vitro composition of genetically modified host cells, wherein the host cells comprise one or more nucleic acids comprising nucleotide sequences encoding the first and second polypeptides of the TMMP of claim 37.

52. A pharmaceutical composition comprising a TMMP of claim 37.

53. A method of treating cancer in an individual comprising administering a therapeutically effective amount of a pharmaceutical composition of claim 52.

54. A method of treating cancer according to claim 52, wherein the individual is also being treated with a therapeutically effective amount of an immune checkpoint inhibitor.

55. A method of treating cancer according to claim 54, wherein the checkpoint inhibitor is an antibody specific for PD-1, PD-L1, CTLA4 or TIGIT.

56. A method of detecting, in a mixed population of T cells obtained from an individual, the presence of a target T cell that binds a WT-1 epitope, the method comprising:
a) contacting in vitro the mixed population of T cells with a TMMP of claim 37; and
b) detecting activation and/or proliferation of T cells specific for the WT-1 epitope.
